United States Patent Application Publication US 2007/0016974 A1 - sequence listing, part 7

SEQ ID NO: 39072 - DNA, 521 bp, Oryza sativa
  Clone ID: uC-osroM202010d12b1
ttcttcgaaagagagagagaggggggcggcgggggcgttttcagagccgcgaggggtgaggcgccgccggtcgccggagcgagcgagcgatgagcagcagcgccgccacctccacctacgcggagagcgtcgcgtcctgccgcgctcccgctcccgccacccccaggcccccccacgccgccgtgaggcgccacctcgacttcgccgccggcgacggcggtgagctggatgacgacgaggtcgaggacgaggacgaggacgacttcctcttccgcgccgcggaggagacggagcggagccactacgaggcccagcgccgcgctttcgcacctcccccgccgccgtctcagcccccggctttcttcgagaggccgtgcatctgcggccgcggcggctgccatgtggaggagagggagctcgggcggtgggcctacgtctgcccggcgactccgaaatgcaaatattctgtttggtgtggagaagctgatattggttcaaatccacagcctgcttatatgagc

SEQ ID NO: 39073 - DNA, 116 bp, Oryza sativa
  Clone ID: uC-osroM202010e01b1
caatctcccgctccccttccccgaggagccactgcgccttctgacgccgccggcatgccgaaacactaccggcctgcgggcaagaagaaggaggggaacgcggggaattacatcac

SEQ ID NO: 39074 - DNA, 339 bp, Oryza sativa
  Clone ID: uC-osroM202010e02a1
gatacattgattgacacagatttatcattttctaccatacttgcagaattacaatgttaagaaagtacacacggtacaccctatccaaatgcagctggataacatgcaacagtctttaaaaagcacaaaggagttgccatttgatgattacactatgtctgataatcccatgaggtagctaaaattgttcattgtcagatgggtcacagatgatcttttgtagttaggcagcaagagggtgcctgatgatcccccgccctttgtcgaggaccaagttggtggccctgaagtgggccctggaaaagaacgggctcagggcatagatttcgtactcctggg

SEQ ID NO: 39075 - DNA, 62 bp, Oryza sativa
  Clone ID: uC-osroM202010e03a1
aactagaataaaggaaaaaagaatagatcttgaaaagataagggcagagtttgggcgtaaaa

SEQ ID NO: 39076 - DNA, 53 bp, Oryza sativa
  Clone ID: uC-osroM202010e04a1
tttttggttttttattattttttcttttccttcctttaaaggaaaaatcacct

SEQ ID NO: 39077 - DNA, 279 bp, Oryza sativa
  Clone ID: uC-osroM202010e05a1
ggggcttcaccggcgaggtggcggtcttggccttcgccttgggagacgccttgggcttcgccgccggcgcggcggcgaccttgatcttggtcttggtcgccggcttcgcggccttggtggtagcaggagccttcgccttggcagccggcttcgcggccttggtggtcttgaccttgggcttcgtggcgggggcggccttgggcttggcgtcggcggcggccggagcggcagggcgggtggaggagagcttgaaggagttcttgaccttggccagcttgc

SEQ ID NO: 39078 - DNA, 58 bp, Oryza sativa
  Clone ID: uC-osroM202010e07a1
gagcaattgaggagacgcgccgtagggggcttaattattaatatttgtgacgcaatat

SEQ ID NO: 39079 - DNA, 449 bp, Oryza sativa
  Clone ID: uC-osroM202010e08a1
gaagagcaaaaaagcgaactcgtctgaatatatttcacttgaatcaaatattcgtattacaattaggagctagatgaaaatttgaaaccaataacagctcctgatatacaaacctatacttctcacaagacttactaagattcacaatgtggacaaataattaactaattctgttctgtctcaccaagatacaaaaaaatcaagtaattctacaacatttatcgtgtatgcagtaaataacgttgtactgcgtgatccagcaggtgaagtgctactgactatatttgcagcatcatatagaatccagatgagtaaacacacattgttttgattactcatccaaaattctttgacggaagtccttcaccattaagggaagaccttccctgagagagacctttggctcccaacgtagcaggtgcttggccttggtaatatctggctttctc

SEQ ID NO: 39080 - DNA, 388 bp, Oryza sativa
  Clone ID: uC-osroM202010e09a1
atattacacacacaaatcattcattcattcattaccaggcaaataacaacaaaccaagaaccaacaaatggacattataggaaagctggtgctgtttttttcccaagttccaaccataccggggattccaacaaagaataaaaaaactggccaattaaatgggggtgggcggggggaaaacaagcacaaatttgagtcatcttaaaaaaggcttttatgggacctcgctaaaaacttttggtaggggcactcataaaatatgccatcttctataaaaagaattgggaggaacaggaacaggaccattgcttttcacattctgctgagcttgggatgatgatcgttgcatgcgaggggaagaattttgcttaccgttaggaatgggcaa

SEQ ID NO: 39081 - DNA, 362 bp, Oryza sativa
  Clone ID: uC-osroM202010e10a1
aaccaccacaaattcccttgcatggtgcctgttcatatctctttctttttcaaataatgctacatatacatgcgccccccaaaaaatgcataatagaaaaggaaaaccaaatagttacaatcacaggacctacaacatctggtccgaaagcgaaaaaaaaagggattatgcagaaccttccccccataacacccaactttttaacctggaatgtatcacaattttctgaaggaagagccagccgtctcaacataaaccttggagccggaaaggagactgaacagacccatctttagaccaaagacgctcttggctcttttctgctagctgcgaaggtttatttaacatggccatagcatgac

SEQ ID NO: 39082 - DNA, 315 bp, Oryza sativa
  Clone ID: uC-osroM202010e10b1
gttcgccgcgtcgaaagcaaccactcctcctggtcgacctcgcgctcgctcggtggccctacaggccaccgccgcaccagggggggcagcgagcgagcccgcgaggtagtcggcgacgaccaggagggggactgggatgggttgctgcgggtcgtcgctgcaggccgggacccacccggagaagccgccggggatggcggcgccggcgcagagcccgtccttctgcctgaaccagcaccaggcgccggggtcggcggcggcgcacggcgcggggagaggtgcaggccccgaggtcccgctgagctttcgctggca

SEQ ID NO: 39083 - DNA, 424 bp, Oryza sativa
  Clone ID: uC-osroM202010e11a1
agcagaaggcaaaggaaatttcccgcaaatacttattcatatgttttgacaacatttctcccgacgcatgctcattgtggcagacgcagctgaccacctagagcttttagttcaccattattatttagaccaagcatacgtcccaagatcagaacacatgcttacaagcgaaaatactaatagcctggctggctgcttcacagaataaccaaacgacaacctcaacagataaaaatgccacggaatgaaaacaaagcagcgaatcgtcaccagaagtcccatcttactcatcaaacactccatcattctcctccaacgcatcctctccccaggggagaagattgcccaggttaccttccttaacaggagcagggttcaccatattctcagcctcgaagcagtgcagaacagatttgggcgaccc

SEQ ID NO: 39084 - DNA, 413 bp, Oryza sativa
  Clone ID: uC-osroM202010e12a1
ttgttttttttttagcataaggcaaaggaaatttcccgcaaatacttattcatatgttttgacaacattttttccgacgcatgctcattgtggcagacgcagctgaccacctagagcttttagctcaccattattatttagaccaagcatacgggcccaagatcagaacacatgtcttacaagcggaaaatactaatagaactggctgggctgctttcacaagaatgaaccaaaccgacaaccctcaacaggataaaaaatgcccacggaaatgaaaaccaaagcaagcgaatcgtcaccccagaaggtcccaattttactcatgaaaacactccatcattctcctccaacgcatcctctccccaagggagaaaaatggccaatttaccctccttaacaggagcagggttcac

SEQ ID NO: 39085 - DNA, 278 bp, Oryza sativa
  Clone ID: uC-osroM202010e12b1
ctttgcctttcccctgcccgcgctgccccgagaggaccatttcacacctcctgttggcgtctcctactcctcgacttcccttccaccaccacccgccgcgcggcgtcgccgatgccaccctgcgcgctcgccgccggggggagcgcgcggcggcggcttcctccgcggcgctgacaagcggggggacctcgggggttgcgcggctgggcggtggcggtgaaagtgcgtgtgcgcccaccggtgggggtgatggggaaggaggggcaaaccacccgagg

SEQ ID NO: 39086 - DNA, 335 bp, Oryza sativa
  Clone ID: uC-osroM202010f01a1
ttgttttttttttttttttttttttttttttttttttttttttggatcaatcatatttatcacgattatgattgctattatgccaccaaatccattatttataccgggaaaaacttgcccctgatttttttccctttttacatagatgaagcagaacaaatcgggatcctaagggaatacctcgggctgagcccttttatcaaaccaatacatcaaatttggcattccgattttctgggggggatttatgcaatgctgaggatgacaccacgacggtgcttttgggcacctgcccatgcctgggaatggcaatcctttgatggaaaaaaatggga

SEQ ID NO: 39087 - DNA, 235 bp, Oryza sativa
  Clone ID: uC-osroM202010f01b1
cgatcggccgcccttcttttttttttttctttgggtctttcgatttcttcttctggctttagatttcttatccttcttcttgttgctaatctcgatcgatccatctatccatccaaacaacctcattcttttttccttcgaatagattcttcgctgctaacgccccccacacagacaacagatttacccgcctttaaaaacaaaaaaggaagggtcacccttctctgtggatttt

SEQ ID NO: 39088 - DNA, 310 bp, Oryza sativa
  Clone ID: uC-osroM202010f02a1
gtataagtagtgtgatttgatgccaagttcttgcatcttgtcaaatagtatttgggcgtgttgatgatgagcgtgcaaatggcggcgtcgctacgtgtgatcgttgtgttggtgtgtgtgacggcgggcgccgccctcgccgacgcggcggccggcggcgtccgcgtcgggctgacgcgcatccactccgagcccggggtcaccgcgtcccagttcgtgcgcgacgccctgcgccgtgacatgcaccggcgcgcgcggttcgggcgggagctcgtgtcgttgtctgcgtcgtcttctacggcggccacgg

SEQ ID NO: 39089 - DNA, 379 bp, Oryza sativa
  Clone ID: uC-osroM202010f03a1
ggaagagaaatagctactaatcatcagggaacacactttggacactaggtaaatagctcaaaattttctactgaggtatctgggcatattcttaaagcccatgtaaaacacctaaacatcaaaatggagctgcttatcatgcataagaatacgtaggtgtgcagatcatggcagcaacttcacagaagcagcgaccgatgaacaatttgtcaaaacagatacagcatggagcaaatgaagttcgagcctcagcgacctttggccgaagcactggaatcagcattctttttccttttcttcagcaagttcaccttggcctttttcctttcctggttaatctcaattgtttgaagaaggcctctttgcttgcgagacataa

SEQ ID NO: 39090 - DNA, 353 bp, Oryza sativa
  Clone ID: uC-osroM202010f04a1
aaccaaagtcttgattacaccgtttaaccaatgttaatttgacaaagagagatttgagatagtttcactacaatttacaaattcaagtattgtacataaatgtccacaaaataaacaaaagtgtctcacaatgcttactaaggcaacaaagcaaaacaaataggaattattactataaaaaaatgatcaagaaacatgtaaaaacaagacgttttgctaggggaggaaaatgggatagacatgttacatatggctgttgtatctagctccatggatcgtcccaacctttgggccccttttttttaacaaaatctacaatggcccgaactgctttttggaccctattggagaga

SEQ ID NO: 39091 - DNA, 197 bp, Oryza sativa
  Clone ID: uC-osroM202010f04b1
ctttctctccctcccgatcgatccatcgcgggggtgtgccctcgcactcgcggcggggacctcgccgccggcggccgcgccatgacatcctccccctcctggttctccggcatagcccgcgcctcctccgccatgccccccggcggagtcgcctccgcggccgctcccctctccgatagctcggcttgtaagggcag

SEQ ID NO: 39092 - DNA, 408 bp, Oryza sativa
  Clone ID: uC-osroM202010f05a1
gagcaaacgagggaacattccctcgagggattgaatagtttccccgcggtgcagcatccaatgttcagtttgtaaaccagatggcagtcacagggcttctgccaattgcagataacatttgcccataaaaatggagtgatacatgaattgttgggtcacgactaatcatgtattgctatcaactaacaaaagaggtcagacgacgtctccatgacacaagacagcgtaagacagcgtaggccatggggtccattattctggtactccgccattaggagagcttagaactggaactgcatctccttggtgtacccgagcttatcaaggtgcgcagccattgccttggtcatcggaggaggaccccaccttaagatttgaatgtcctcggcaggtgctggcaaatgagct

SEQ ID NO: 39093 - DNA, 439 bp, Oryza sativa
  Clone ID: uC-osroM202010f05b1
cttttacccgccaccgattccgagcgcgccgcggggagcgagcgggagagaggggggtcgcaagcgcagcttcctccccggccatggatctcctgcacggggagagcgtccagaccacggtggccatcgccgtcgccgtcgtcgcggtcgccgcgggcggcgccttcctcctcctccggtccaggaagcccaagggctgtttggatcctgagaacttcaagaagtttaaacttgtggaaaagaaacaaataagtcataacggggccagattcaaatttgctcttccaactccaacctctgtattgggcctttcaacaggacatcatatcagaatgcagaggacaagatgctacaggcgaagaagtaatcaaaccttatacccctactacattggattctgatctagggcattttgagcccggtattaagatgcaccctc

SEQ ID NO: 39094 - DNA, 242 bp, Oryza sativa
  Clone ID: uC-osroM202010f06a1
aataatataatagatagattttccagtgcctagtttccatctccggttactgctaatgactgaatttacatgagattactcccaatttcgcatcacaaaacgctcagttcgcacacagtatcgatgttagcaaatgagggtcaaatgtcatgatctgccgatggtgtcgacgttgtcgagccagctaaccacttcttgtatcgccggtcggctgaacggcgtctagtcgacgcaaaggcatg

SEQ ID NO: 39095 - DNA, 485 bp, Oryza sativa
  Clone ID: uC-osroM202010f06b1
ctttctgtccttcctcgccgaggcctcgccgccggggggggatgccatcgtcgccgactggcgaggatcgccggactgctgcaggtgggatggcgtggggtgcggcggcgcaggcgacggcgatggcgcggtcacgcgtctgtcgctgccgggacgcggattcaacgggacgatctcgccgtcgattggcaacctcaccgggctcacgcacctcaacctgtccggcaacagcctcgccggccagttcccagaggtgctcttctccctgcccaatgtcaccgtcgtcgacgtcagctacaactgcctctccggcgagctacctagcgtggcgacgggcgccgctgcccgcggcggcctctcgctggaggtgctcgacgtgtcgagcaacctcttggcggggcagttcccgtccgcgatctgggagcacacgccgcgcctcgtgtcgctgaatgccagcaacaacagcttccatggctcgatcccct

SEQ ID NO: 39096 - DNA, 417 bp, Oryza sativa
  unsure (1)..(417): unsure at all n locations
  Clone ID: uC-osroM202010f07a1
acaactgaaagatcgatgaagatttgcacattgatacagttaattcacagtagttctattacaggtagttaccaacaattgattacaacaacctacatgcacaagtatttgtacatttgtagagttgtacaactactacactaacgagtcactgcttactagacatcggagacgccggacacaaaaacgacgccggcgagcagcctccggaacctaaaaaaccaacacaaaaagaaaaggatctacacaagaacgaacatataatccatcgcctcgccgccgcgcagaatgcctaaaacctcatctgcgccggccggcaatggcgggctatggaggagaagagctagttattgntgttgagcagcgagtcccagtcgatctcgtacgacgggtacttggtgagcgcgaaccccttcg

SEQ ID NO: 39097 - DNA, 458 bp, Oryza sativa
  Clone ID: uC-osroM202010f08a1
ggcatgaacacgtagaactagtaaaccattttagagaatagatcatctagagctgagtacaggggctgggcggctctgggtttctccaccttcccaaacaggatatcagttgtggtcaagtaagcatcgccatagaagcgtagattggtctctgatctggttgtcacgacatttccttccaatgagaccccaacaaaggcacctttgctacagctgtaagtgtagcagagcccagaacctttttcactggccctaacatctgcttcaaaggccctgccaattggtcctgctgctgcacttaatcctgccccaagagaaagatgcatgcgactgctgaatgccttgacagccttacgatcatgaagtacaattataaaatctgtcagttcgccaccaaactgaactccccatcccaggccaacagatgcaattgctgatggggcagaccatgatccatc

SEQ ID NO: 39098 - DNA, 132 bp, Oryza sativa
  Clone ID: uC-osroM202010f08b1
tggtctggcagtaggagaacatgccggcggcgagctgggtttatcaagcgacaggccgcccctgcccaggccgacgagccccgccgagccgttccagtcgtcgctgctggcgttgctgcacccgaaggcaat

SEQ ID NO: 39099 - DNA, 329 bp, Oryza sativa
  Clone ID: uC-osroM202010f09a1
ggaagagtaatagctactaatcatcagggaacacactttggacactaggtaaatagctcaaaattttctactgaggtatctgggcatattcttaaagcccatgtaaaacacctaaacatcaaaatggagctgcttatcatgcataagaatacgtaggtgtgcagatcatggcagcaactccacagaagcagcgaccgatgaacaatttgtcaaaacagatacagcatggagcaaatgaagttcgagcctcagcgacctttggccgaagcactggaatcagcattctttttcctttttttcagcaagtttaccttggcctttttcctttc

SEQ ID NO: 39100 - DNA, 429 bp, Oryza sativa
  Clone ID: uC-osroM202010f10a1
aagaaaacggcaaagttcatttcatgagttagatggaagcgcctcacatctccagagacctaaccatttcttatactacaccatcaagggatacatagaacttcgcctactcaagagaactatctaaatagggagacatagccgaggcagcctttgtacagatcctaaacaccaaccatttcaaccaagaggggacctacatagctatcaaccaaactcccaactcaagctgcaggtgccttgcgggtcttcttcgcggccggcgaccggacggtcttgggcttggccttcgccttcgccgccggagacttcttgggcttggcgaccaccttcttctccggcgccttgcgcttggtgccagcggcgggggccttcttgggtttggcagcggcggcgtccttcttgggtttggcggcgtccctcgctggc

SEQ ID NO: 39101 - DNA, 282 bp, Oryza sativa
  Clone ID: uC-osroM202010f11a1
aaaaaaaaattaatccttcaacacggtacagtactgatcacattacatcggcagttgcatattgcatacagtaatacagatcgatacatgcatggtaggcaccttatttgcactgaaatgaaaatacatcacaaacatagttacaggagtagcttagctagttcgcccttgcaaacgccagatcaagaagcgtccggaaaaacttgtggggatagatgggtggattgtacgtcagtgcctggtgaagcagtccagcggatggagtcctaccaggagcagggt

SEQ ID NO: 39102 - DNA, 180 bp, Oryza sativa
  Clone ID: uC-osroM202010f12a1
ttgtttttttgaataagtagggtgatttgatgccaagttcttgcatcttgtcaaatagtatttgggcgtgttgatgatgagcgtgcaaatggcggcagtcgctacgtgtgaatcgtttgtgttggctgtagtgtgactggcgggacgcctgccctcagccgactgcggctggctcggctg

SEQ ID NO: 39103 - DNA, 491 bp, Oryza sativa
  Clone ID: uC-osroM202010f12b1
gttttggcagtaggagaacatgccggcggcgaggtgggagacgagcgacaggcgcggcctgcccaggccgacgagccccgccgagccgttccagtcgtcgctgctggcgttgctgcacccgaaggcaatgccggggacgcgcacctggtcggccggcgacgagccgaacgtgaacgtctccgagccctgcaggccggacgtccacccggtgccgtacgtctggttgtacctgcacgcgcaccccggcggcggggtcgcgccggccagcctcgcctcggcggcgcacaggttcagcgcgctgctgcacgggagcacgcggaacgtcggcgagctcgacgggttgtacagcgggctcggctgcttgaagcaccgctccccgcacggcgcgcactgcgtccagacgaggtcgctgccggtgtcggcgatggccgggtacgactgcggcggcgtgccgatggccagcggcatgatgtactccccgccgttgggca

SEQ ID NO: 39104 - DNA, 135 bp, Oryza sativa
  Clone ID: uC-osroM202010g01a1
ttttggttttataccacaactatagccatctttatttttgtagtgactcacataagacagtgcgaaattctattgatcgagggagaaaaattttaaaggtccgaactagggaaaaaaatatatccattacccaca

SEQ ID NO: 39105 - DNA, 163 bp, Oryza sativa
  Clone ID: uC-osroM202010g01b1
gttcttagctgacaggaagactgctaagtcccattagtaatattttacaagaggggtgggggtgcctgaaactactgtgaagaaggggaacgactattcactatgaccctttgtgcttggattcctcatatttttgggccttggaccctctcttctttcaatt

SEQ ID NO: 39106 - DNA, 234 bp, Oryza sativa
  Clone ID: uC-osroM202010g02a1
tttgttgtttaccacaactttttaaggatggaatcaagtagcaagactttgaccccagactacaaatcagcgacaatcttttaaaaaacctatttgattttggcacatgactggcaagaatggcatagaatgtaaaacaacatgcacgcaacctctgtaacctaaaggggaactactgtacatgatacatgtcagtgttcgattgaagaaccactatacagttacaacggttga

SEQ ID NO: 39107 - DNA, 380 bp, Oryza sativa
  Clone ID: uC-osroM202010g03a1
caaaaacttcccgacataaattttagcgataatttataattttcagacccacctataagtgataaagggggggtgcagccgactgcaaagatcctgacagccgcctgccccgccactctgaccgccagagacggcgtccaccaaaaccagacagttacattcgcaatcccaatacggaaaaatataccgtgaaaattccacgtgtggtgtaaatccagaaactaccggtcgtacaaaagaatggacatataagatttataactttttactaatgctaacgtgaacaaatctcaaaaatcaatttgtatatgctacgatatatggagattgcaccgacatttttccctttccaacgtgcaggtgtgagacagtgagaggga

SEQ ID NO: 39108 - DNA, 354 bp, Oryza sativa
  Clone ID: uC-osroM202010g04a1
aagcaaaactttagtatgtcctctcgattaatcacggacagcaaaacgctaagtatgtcacacaatgcatatggtagttctctttggaacgcggacagtcgatgtacagggctactcacatactgcccacggtctctgaatacagaaaactataccagtatggaaaaattacagtggaatgaatacatcagcatacgaaaaaactggcacactgctaaaagaatcgaatcgaatccgacaaattttatacagcaggcacatttggtataggtggtgctggtgatggctcagttgaagaaggcttatctgctgtctccggtgtctcggtagaaggtgcaccatttggaacttgac

SEQ ID NO: 39109 - DNA, 150 bp, Oryza sativa
  Clone ID: uC-osroM202010g04b1
cagatctctcctcgctgatgtgccgcccaccccctctaccgaggcgggggtgccttttccgatcgcggggggaatgctccgcctcagggcgttccggccgaccagcgacaaggtggtgaagatccaacttcaccccacgcacccctggtt

SEQ ID NO: 39110 - DNA, 239 bp, Oryza sativa
  Clone ID: uC-osroM202010g06a1
ttttggtttttttttttttccaaacatatagcacccactgtatcagcctttattatctttttcccaagacacagcagggcatattttcaggattccagatccagtttcacaacttgcgtcaccagtatacatatcaccgttatcacattttattcacgactacggtcgtggtcgacacatttacagttcaatgtcttgactggtccaaacatagccaccacccactgggattcctcctg

SEQ ID NO: 39111 - DNA, 358 bp, Oryza sativa
  unsure (1)..(358): unsure at all n locations
  Clone ID: uC-osroM202010g06b1
tcttccccacatccagttcgattgtggtgtttttacaacaaatcacggcatggatccctacaagcatcggccgtccagcgggagcaattccaccttctggaccaccaactccggcgcccccgtctggaacaacaacctcgcccttaccgtctgagagcgaggccctatccttcttgaggactatcatctgattgaaaagcttgcacagtttgacagggagcgtattccttaacgtgttgttcattcaggggagccattgccaatgggatttttgaggtcactccatgatattttttaccttaaanntgctgatattatctctgctcctggtgttcagaccccctttatttgttcggtt

SEQ ID NO: 39112 - DNA, 214 bp, Oryza sativa
  Clone ID: uC-osroM202010g07a1
aggaccacttgggaattctgaacattatgaggagtgcatgcactttgcacctgtgaaacatgcagggggccccattggacaatagcagtacatgtatttaactgggtgggtaaagggagataccacagagataaacactaacaccactggtttacaaaagcaggtttaaatgtgttcgtgggggagtacatggattattatatgacacacggta

SEQ ID NO: 39113 - DNA, 382 bp, Oryza sativa
  Clone ID: uC-osroM202010g08a1
gctgcaaacattatagcataggttcaatgtcaaaatattacaatcatcagttcatcacatcacaaaccagcacacatgtgctctccaagaattacatcaaatcggattgttctcttccacccttattagcaaggagcactggagatgaacacatctcacataagactagacaagattacaacacacattgcttattaatggtctagattaatgaaaacaacatgaagcaaaccataattaaccataataagcatcatcagacacaaccacagaggctagtactactagttgtaatgcagctgcaaccatgccattgatgccaatggccatggcgtgcgagctttccatgggggctcagaactggaaggcgtcggccatggcg

SEQ ID NO: 39114 - DNA, 152 bp, Oryza sativa
  Clone ID: uC-osroM202010g08b1
catgccgtgcctgccgctccgtggcaccatcaccgcgtccggtgacctggttcccctgtcctacattgccggcctcatcaccggccgccccaacgcgcaggccatctcgcccgacggcaggaaggtggacgccgcccaggcggttaagctcg

SEQ ID NO: 39115 - DNA, 360 bp, Oryza sativa
  Clone ID: uC-osroM202010g09a1
gtccggctttttcgtcaccgccgcagccgcggtggcggggcccagcagcggcgcggggaagcgcgccgcgtcgcacgcgaaggcgtgcgcgacaggtgcagcggcgttcacggcgagcgcaggcatctcgtcacaaaccggagaacgctaaaatccacagaaaaaggttagccttccttctttttttttcttttgctgtaaatctgttgtctgtttcggtggcgttagcagcgaagaatcaaatcaaaggaaaaaagaatgaggttgtttggatggatagatggatcgatcgagattagcaacatgaagaaggataagaaatctaaagcaagaagaagaaatcgaatgattgaaagaata

SEQ ID NO: 39116 - DNA, 365 bp, Oryza sativa
  Clone ID: uC-osroM202010g10a1
caggtactgctatgaggggaaaatttctataaatccagtcatgttcttcaatcttacatggtgattatatcctacctgataacacattgttacaagctaaaactctacgtatgggcttttgcagcagcctgaaattgcaggagaagataggaggttgcaacctctgaactctggtccatcttctcagaattccaaggcaccttccaactacttaagctacctgcctggcttgctgacacgcgccttgcgaacggcttcttggatctgcctctcgtgctccttgagcatgtcctcaacgttccctcctggcggcatcaatggccctgagtgggggatccttctggacttcctcccatgggtcatgc

SEQ ID NO: 39117 - DNA, 430 bp, Oryza sativa
  Clone ID: uC-osroM202010g11a1
aaattgaacaaacgcgcatattataagtgacgaagcggtctcacataaaacagggcacacaggttacaacaacgagggttgtaagcccattaagccccaaacatcagatcaccacaagcaaatgtctcgaagacacacgcacacggcaacaggataactccacactggcagatcatgggatagcagcagttatcaatcaggccttgacacacagaacatcaagcccccagacgacgacgactcctctagtactcgtcaccatcatcgccatcctcattctcgtcggactcagcgccaacctcctcgtagtccttctccaacgcggcgagatcctcacgggcctcagagaactcaccctcctccatgccctcacccacgtaccagtggacgaaggcgcgcttggagtacatgaggtcgaacttgtggtcga

SEQ ID NO: 39118 - DNA, 406 bp, Oryza sativa
  Clone ID: uC-osroM202010g12a1
gaaaaaaaatgaagtttattcatatgatcatgatgagcacgtacttggagaaaactttgttacatacatgcatggctcgctatataaacaaaacaattaattaatgaagtgattgaaatcaagaaaaaaaaagaagggacaggtaaatcttacgataatgatctacatggaaattaattataagatggtcacggccggaatcaaaagctgaaatccataatcacagtctcggcgagcagctgatgatatatgacgataattaagagagatgattagttaaccacgttggacttcttcctgatctcgccctggctgccggtgagcactttgacgccgcccattttgaccatgggggcggcgaaatcggcgaagaactcgtccttgtagccgcccccggcgtggcgct

SEQ ID NO: 39119 - DNA, 279 bp, Oryza sativa
  unsure (1)..(279): unsure at all n locations
  Clone ID: uC-osroM202010g12b1
ttatatctagccttagcctagctagctagcttgggtgtctttttatgatcgaggggggtggcgaccatggcgccctcgagggtgatcctagcgctgctgctcgcggcggcggcggtgatggcgtcctccgcgcacctggacgagaagttctacagcaattcttgccccaccctggaggcccgcatccctaatgagatggtgcgcgcgctcagagnngntgggcagcctcgccggccccctcctcaggatgcacttccacgactgctttgtcagggggtg

SEQ ID NO: 39120 - DNA, 399 bp, Oryza sativa
  Clone ID: uC-osroM202010h01a1
ttttggtttttttttttttttttttttttttttttttttttttttttttttttttttttttaaaaaagaacagggcaagcccgcccttgtaattttccttgccaaagtttatggccaaaaaaaaggggggctttgggccaccgaaaaagggcttttcccctttgatcttgcgaagggcttgctgaaaaggggaaggcacaaaaacttttggcgcccccaacagggagaagaaattccgtttgaacccccggggggtgaacccgggggggtttggggggggaagagggcaaagggggcgggggggcccccgaccatcgagaggcccaacgcgtttaccccaaagcccacgttgtagaggaggcttttcaggtaactccccctccgagccaggggggcctt

SEQ ID NO: 39121 - DNA, 462 bp, Oryza sativa
  Clone ID: uC-osroM202010h01b1
gttctgtcttcttgggcgtagagccagctatctgtcagccaccgcacaacccaggggtggccttcacaaagggaggaagaagatgatggaggtggagaagccatgggagttgaaggaggatgtggagatcatgactgaggaggaggaagaagacgacagcatcaacctgctgtaagccaggggcaggaacaagaagcacgcgcttatcaatggagattaacaacaacctcttccataagaagaagaagaataagaggttgttgaggagcacaagagcgttttttttgatcccacccaaggttttgagcatgttacttgagtaagtggtcagaatgaagttaccagagtggagcacttcccttgctaaaaggaaaaagtgccttgaaaatttaactcaaaaggggaaatgaacttttggacacctggaaaaaggttttttttaagaaacttatgtaatttttt

SEQ ID NO: 39122 - DNA, 395 bp, Oryza sativa
  Clone ID: uC-osroM202010h02a1
cagaatcgacaataaatgtatttaattcatatcagtatcttgccagataagattgctccagcaacaaatgcctattacttgtctgatctattccaagaactggccaccctacaaagtgcaaaggtactggatcatggaaatgaagtgtgcaaggatatgaacacactgaaaaagcaatgtatgtacatcacttcttggtacatataatctgatggagaaaaacgaagggatccttgtatagtattacaatattgtaataaccaaggggacaatctaaactcaaaaggcaccaatcagtccatgtgatgactcagcagttcggacacatagcatcccttgtagcaaaagcatacctgtcaccaaatttagtcaaatgggagctactatcttctcct

SEQ ID NO: 39123 - DNA, 291 bp, Oryza sativa
  Clone ID: uC-osroM202010h03a1
ttgtttttttttttttatcattcatgcattccttgataacttcaaaaccatactgatcggtacataacatgggcttcctgatctgtttcaaacactttgtgctgatcagagaaaacactcttagcaaacatttcagactaggaaaatactactactgggacatatatggcccagccttattcccaaatttgggtttgcttttgcatccaggttgattctttacttaattattagttcactttggagcagctaagcctgaactggccctggcttccggagagggctccgagg

SEQ ID NO: 39124 - DNA, 123 bp, Oryza sativa
  Clone ID: uC-osroM202010h04b1
gttttctgtgtgtgtgtgtgtcacaatgagagatgggatactttataaagaggcaggtggttgacacaacgtgcttctctccccccgcctgccattggccgaccccataccgcgacaggtaag

SEQ ID NO: 39125 - DNA, 327 bp, Oryza sativa
  Clone ID: uC-osroM202010h05a1
ttttggtattcctaccaaccatgctagcattattatcattatcaagacatgcaagatgcatgtgtgattacaaaaatagtacatctacatccatagtacatatatgcaccagctgaagaagcctagaaaactagtaagatacatcatctggtattctggttttggcagcagcactagctaggtagaaagctagctagaggaagtcgaagcgcatgaggagcctgacagacttgtacctggtgccccggcgatcgtggagaggcacagcgcggatgccctgctttagcttcgacactggcaggcatgtctgccccccaaagtcatgct

SEQ ID NO: 39126 - DNA, 245 bp, Oryza sativa
  Clone ID: uC-osroM202010h05b1
cgcatgttccgctcgccggcggccgacccgccgcgggacgtccgagccgccttcctggccgccggcggaggcgacggcgggctccggcggttcctcgcgcaggcgcagggggagacgccggcggaggtggaccgcatactcacgctgtttaacggttgtagctgaggcagcggaagaggaggcatctcggaccgcctcgtggggccccggaccgggccgggccccccgttcgaagacttatttgg

SEQ ID NO: 39127 - DNA, 271 bp, Oryza sativa
  Clone ID: uC-osroM202010h06a1
ttttggttttttttttttttttttttttttttttttttttgggccccgaaaccaaagagattttttggccgcatcacatgtaaataatcggtccaaaacacaatcgatgttgatcaaagagaccgtcgcaaagttgtagtactgaagaaagggtacacaacagtcacagttttttaaaacaggagtcttttggaaactcagacacggtgtaaggggggagataagatgtattttgggcctagatgtccatgggcgcggcgtccgggccctt

SEQ ID NO: 39128 - DNA, 126 bp, Oryza sativa
  Clone ID: uC-osroM202010h06b1
acacatacacatcgtaagccgcccaaagggtacattttaaatgaatgggggcgcgaatcacacgagagagaaatccaaggccaggaccaggaggaggagaaggaagcttctagaatgttcctgaac

SEQ ID NO: 39129 - DNA, 408 bp, Oryza sativa
  Clone ID: uC-osroM202010h07a1
tggttttttttttttttttgcatcaatatatcctcattgatcagcttctcatccggttgtgtcatttacacaagaacaccagccatggtgaatggcaatggtgccataacactatcatatactgtatatatctatctaccacggtttcaggtcttcccgggtcccctcggcccagttgagcaccttctgcccgggcttgaggaacacatccctgccatggggcagcttccttgccagcgcgttcatcacctgggggaagccatccccgggctccgcaggctgcgggaacagcatggtctgcttcatcgacggctccgggagcatcgcctgcttccggaggatcacctccgtcggtatggaggtcaggatggtgtccagctgcgggacattgtcctcggccacgaacac

SEQ ID NO: 39130 - DNA, 53 bp, Oryza sativa
  Clone ID: uC-osroM202010h09a1
atgatgcatgcattccttgataacttaaaaaccatactttttgggacataaca

SEQ ID NO: 39131 - DNA, 168 bp, Oryza sativa
  Clone ID: uC-osroM202010h10b1
ttatttattaaaaccattaattaagatgacccttgtccatttttaaaaaaaaatggggggtttatcctctttatttttttttaaaaaaaaaaaaatttcaatctttacttatttaaatttattttaataatctttcctctttaaatcgatttcttttccccttttccc

SEQ ID NO: 39132 - DNA, 369 bp, Oryza sativa
  Clone ID: uC-osroM202010h11a1
ttgttttgaatgaagaacagcttactcgtagagataaaacaacagataactccgacatgaaattgtcaaatgacaggtgtatgaaacacaggtaaaatgccgtaccccctaggtacaaaccattgagacaaaaagaaaagaaaagaaaagaaaaaagaacatcacatccctcggtacgcagacttcacttcacatagagctagaacactcaggaacaatggtgcagccgctgacactcatcatgcaacaacatcgacatgagatacccaatggatagctccagagcaaattttctcttttgctttttacctacatttccagccaaacggggtttctgctttcatgatgaataaaaggcacatttgcatg

SEQ ID NO: 39133 - DNA, 80 bp, Oryza sativa
  Clone ID: uC-osroM202010h12a1
cctccttccggtgctgttaaaccagcgccggaaaacaccgcctacgataccgaccggctcgctacccgcagaaggcttgc

SEQ ID NO: 39134 - DNA, 321 bp, Oryza sativa
  Clone ID: uC-osroM202011a04a1
ttggtggtgattaaaccactagggttacatgtcagaacttacaggtgatttagctcaaggagggcactcaaaacacttttcaagccttcagctactgaccaccagagacgtcttacaaaacgggactgcagcctgctacgcagcacaggtgacaaaacgaagcacggacgcaaaccttacccatacatccatcacgcacgtcagagaaagaaaaaagagcacagcatcacaaagacacaaaactcttcactggcaaaacaacctgtgaagggcaaatggggctcaatgctattcggccttagcttctttctcttcgtcttc

SEQ ID NO: 39135 - DNA, 483 bp, Oryza sativa
  unsure (1)..(483): unsure at all n locations
  Clone ID: uC-osroM202011a04b1
tttcgcttcgctactctcctcgtcgtctccggcgccggctttggattccggcgagcggcggcgcgatcccgggcggcgaaggagggggaagccatgagggagatcctccacatccagggcgggcagtgcgggaaccagatcggggccaagttctgggaggtgatctgcgacgagcatggcgtggacgcgacggggcggtacgcgggggactccgacctgcagctggagcggatcaacgtctactacaacgaggcgagcggcgggaggtacgtgccccgcgccgtgctcatggacctcgagcccgggaccatggactccgtgcgctccggcctcttcggccagatcttccgccccgacaactttgtcttcgggcagtccggcgccggaaacaactgggccaaggggcactacaccgagggcgccgagctcatcgactncgtcctcgacgtcgttcgcaaggaggccgagaactgcgactgctta

SEQ ID NO: 39136 - DNA, 280 bp, Oryza sativa
  Clone ID: uC-osroM202011a05a1
aaaacttgggtaaatatagctcaacttgtacaaagttcacataaaaaggcattgattcatgacacttagagagccatgcacaccacttattaggacacacaaagggcaaggctgcagagaaattcaaccaacacaagctgaactaacggccccacctgtcaacctttaactggtcgaggccggatactcttgtgaaaaacagcaacaccacccatgcagaaaaagacaaatttttacacacacaaatcgacgacactgcagcctacgacatacggggagg

SEQ ID NO: 39137 - DNA, 172 bp, Oryza sativa
  Clone ID: uC-osroM202011a06a1
ccccccctctttaatggtgttttttaaactttggttttaacacccacaaactcacccattacaccattaaaaccaatcaaacacaaaaaaaaaaaagcacaaaatacccacaaactacacctaccaaaactaacgcacttttataaccaaaaaggggcccctcttttaccta

SEQ ID NO: 39138 - DNA, 404 bp, Oryza sativa
  Clone ID: uC-osroM202011a07a1
ttgttttttatggtgccagggtcacatatggttccttcatattgaaagagacagtattacagatgcggttacacaacaacctgaaaaaaaaaaagaacaagacaaactgatagagcaaactgcagagctctcttgcagtttcagctgactcaaaaaaatgaaaaaaggataaaacgccgaagatatctgaacactaaaactctggctggtacaccgatatcactagcaacttcgcaaggcgatttcaaccctttcatcatcttcccatcttcttcttcttccatggagcaaccagtcactactgatcaaagacacatcaggtaggcggcgggggcgcctacaacggccggcaatggaggtagatagcgagagagagacccccctttcatgggcatcatctttat

SEQ ID NO: 39139 - DNA, 371 bp, Oryza sativa
  Clone ID: uC-osroM202011a08a1
tggttttttttattttttgggttttttaagaaacaatgagactccatgaaacgttgcaaatcataagagtaacatcatcgatcaacttatcttagggctacaggtgactcaagacaacaagattgccatccaactcaaacagtgttgttgattggggagaaaatcttgcatgagaataatgacaagcgggatgaaaagctcagaggggtgctagtcatccgaaaagaaaaattctggggggacaacaacaaacatgggggatcatgaacttggtttgtcggctttttctccttatttgtgaagatcattcatttgaaggaaaaccctgagaggctactcaaatacggggcatgcacttttaaaatcttggt

SEQ ID NO: 39140 - DNA, 437 bp, Oryza sativa
  Clone ID: uC-osroM202011a09a1
ttgttttaagccacccaaacaagtttcatctatgagaatttaaagaagatttaaagtttcatctaattgatgaacagaaagaacagacgagcttgtttagtttgcaaatttacatttattatttattccgtgcacaagaacataataacatgatcttgatacactactaactatatattataaataagtttctaccaatgatttcatttccctctaattaactgtgactcgaggacagcagctttgcaatgctggtacctacgcgcgcccaatcttctccaccagccgcctctcaatctccatcctcttcctcatgagcaccgtgtacttctccaggagctccttgtcctccacaccctcttcggttgagacggcgagctttgcacccaaggaggtcttctccaggttaccctggtacatgcaggagatggggacga

SEQ ID NO: 39141 - DNA, 505 bp, Oryza sativa
  unsure (1)..(505): unsure at all n locations
  Clone ID: uC-osroM202011a09b1
tatcagtttgttgctttgctgcttcttccggttccaatttgagaggggggattggcgcgggaggcgaggcgaggcggcagccatggtggggcggagctccctcccggagggttccctcttcctcggattcgacagctccactcagtccctaaaagctaccgtgctgaacaacgaattgataatagtagcttcagatattgttaactttgattctgacttaccgcactacaaaacagaaggtggtgtttacagagatcctgcagatgatggccacatattttcaccaacaataatgtgggttgaagcctttgaattgctacttgagaagctaaagccaaagatcaactttagcaaggttgtggccatttcagggagtgggcaacaacacggcagtgtttattggaagaagggtagtcatgcggngttgtcttacttggatcctactaagagctntgtatcccagctgaaggatgccttttctaccatggactcaccaatatggatg

SEQ ID NO: 39142 - DNA, 419 bp, Oryza sativa
  Clone ID: uC-osroM202011a10a1
gtggttttttacacacgaaagcaaaataatcacatgttactgagattttacagggttggcactctgctgtacatacttctcgttccctcatgcccattagaaaaaaaaataaaaaaggacacaccagggtagattaatacaaaactgcaagcctcaaaaccaaacctgtgtgaccctcgaaccagtactgaacgcttggtaaaatgggagatggtaagagggcacacccatgaatcgaaagaataagccgaaactagcaaaggcaaactcagactaaggaaaaatggaggactcatcccacacaatgtgaaaatagacacattgcacaacgaccatggctgtcaagggctattcaggcatatacaagttgacttggacgatcaaacaatgctttaactggaggttgaatgaggaaattt

SEQ ID NO: 39143 - DNA, 422 bp, Oryza sativa
  Clone ID: uC-osroM202011a10b1
tggtctttttaaaataattattgggttatttcaattaagaatacttttgtacatcttgtttacatgaatacaattcgttacatggatccatgattcatatctttgtttttgtttcaaaagctaaatcaaggattcatatgttagttaaggccgcgcacaaatggcatagtctgcatccatcttagctttgcttgctgattacaaccatcttggaataattccaaatccgcgtcgacaagattgaacaatatgaattcatacaggttcaccttctactgctgatagcgacgacggagatgatctgatgcgattccggggcaatttggcagaaagcatatcgtaacttgtgatcaaaattgagatgtacaccttttctcttgcagttatgcttgcagataccctcatggatggactgaaactga

SEQ ID NO: 39144 - DNA, 290 bp, Oryza sativa
  Clone ID: uC-osroM202011a11a1
ttgttttttacacacgaaagcaaaataatcacatgttactgagattttacagtgttggcactctgctgtacatacttctcgttccctcatgcccattagaaaaaaaaataaaaaaggacacaccagggtagattaatacaaaactgcaagcctcaaaaccaaacctgtgtgaccctcgaaccagtactgaacgcttggtaaaatgggagatggtaagagggcacacctatgaatcgaaagaataagccgaaactagcaaaggcaaactcagactaaggaaaaatggagga

SEQ ID NO: 39145 - DNA, 526 bp, Oryza sativa
  Clone ID: uC-osroM202011a11b1
ttaagtgttacttgttagattgtggtgtcgggtatttgttaggatgggcagaggcacatctttgcaggagaggaagagtgccagtgaagctgctgagaaattgctctctgatgataaccgaacaaaaacacatgtaatcaaagtaattgaggggtttgagacagttatgttcaagtcaaaatttaaagagtggccacagacacctgacttgaaattgtcatctgaggatggaagaggaaaagttgcagctcttctgaaacgccagggcttaaatgttaagggcctgatgaaagctgctcctgcaaaagaagaaccccaagcttacattgattgcactggcagtttgcaggtctggcgcataaatgataaggacaagatacttttgccatctgctgaccaatcaacattttacactggcgattgctacatatttcaatatatgtaccctggagatgacaaggaggagtgtcttattggaagttggtttgggaagaagagcattgaggaggatagggataactgtatt

SEQ ID NO: 39146 - DNA, 426 bp, Oryza sativa
  Clone ID: uC-osroM202011b01a1
ttggggtttttttttttttatcagttgtaaacagccaaagagatcattgatattttaataagcatcatgcataaaccacgcaggttatcaagtcagttttaaggtccagcacaactcttgcacactagggactatgacacacaaagagcggcagcattacaaggtttgcgacaacataatagttattcagtattcactcatgcaccaacagaaacatcctgcatggtatcaaaagacccagcataggttacgcaaacattttggctttggttgctccaacactatgcttcagggcctaatagtagaacattatttcttgccgcgcagctttgttccaagagccctttcaagcttcccgatgatctgctggttcggaatagctttacctgactcgtactcctggatcacctggggcttttcattgat

SEQ ID NO: 39147 - DNA, 449 bp, Oryza sativa
  Clone ID: uC-osroM202011b02a1
gcgccgctcccgccggcgtccgtccgctccgcgttcctcgcctccgccccctccccgcgccgcttctccgtctccatcgccgccggccgcgccaggagccccatcattgcgatggcttctgccaaggaaggaaatggtgccccaacgaagaggacaacccttcatgatctctatgatctccagggtcagtccccgtggtacgacaacctctgccgtcctgtcaccgatttgctgccccttattggcagcggcgtccgtggagtcaccagcaacccatcaattttccagaaagccatctcgacttccaatgcatacgatgaccagttcaagcagcttatattagctggaaaggacgcacagagcgcttattgggaacttggcatcaaggatatccaagatgcgtgcaaactttttgagcctatctacgaccagaccgaaggggcagatgg

SEQ ID NO: 39148 - DNA, 418 bp, Oryza sativa
  Clone ID: uC-osroM202011b02b1
aaatgaaacgtgactagctatatatgctttattacagtattttacatgtcattttaacctctccgagatgcatcattaattcagtctcgcaatgttgaccagaaaaaaaattacagtctagatgtacacatgaaatcaacttgcccaacaatttatcagaaaatgcatagcagttcgcaacctcagttacacaaatagcagccaagagcgcctagaatacaaaagctgacccagaaattcgagagcagcacatcacaagagagtttgagagagggagagagccagcaaggtagagcatttatttagtaatcgttcacttgccattgccagcgttcaaaacatttcagctatctttgcacctacaggctcacggtcttcttgagggaattgcccttctcctccaagctcccaagcaggc

SEQ ID NO: 39149 - DNA, 403 bp, Oryza sativa
  Clone ID: uC-osroM202011b03a1
gggtgcccagcgcaaccgcaccctctcctctccagcagcggcgacccctcgcctcataccctttcctgggcaaggccgggaggggatcaatctagggtttccgccgccgccggttccccggacgttgctgcatgacgatggaagatggaagctgtccttcaccagtcacccccagcgaagccgaagctggagccgaagattacgaatcttggacactgaagcagaagattgaggatctcgtcaactgtgatcctatccatggtatcgggccaaaaaatcctaaatataaagcatatttcgaggaaaagctccaggagaagttaagtaagtacgtccgagctgtattgccgaaacttcgtccagcaattcagaaggatagcgtcaagcaattctttcaagtcta

SEQ ID NO: 39150 - DNA, 498 bp, Oryza sativa
  Clone ID: uC-osroM202011b03b1
ggtttttggtttatacatgtggcttcattatatgttttgaaacctgtaacaatgtttagtatgtttgttgtttgatcatgtgagggtcctaaatcctactagtaactcagtatttgctagtgaaagaagtcaggatatgctgttttctccccttctcatctatgaccaaaatacattctagaggcttattatagaaaaaaaagtgtttcaacaagcataccgccaaagattttctgtagtcaagtgcgcttaaacaccttccgggacattgaagcaacagtataaagcatccttctggactcacttgacaatgggggccagcccatcgaaccaagatttcccattgatttgattgggttacacgggtggtccatactcttggtccccttcgtgctcgcttcagcacttagcaagtccttcctgcttagttgacaggatggaactatctttagctgcaaccgtcgagacaacaccgattttcagtatgggaagaacata

SEQ ID NO: 39151 - DNA, 282 bp, Oryza sativa
  Clone ID: uC-osroM202011b04a1
ttttgttttttttttttttttggttttttttttttttttttttaaaaaagcaaaatcattttggtattcacctcatgagaagaagaagtttcacattggcatgtatggctcctgccccagcagcgaacgagacccccggtcgcggatcctggccgaccccgagcgtcccacggccatttcctggtggacctcgacgactttcggcgacggcgtgggccccgggggcgcccccgaggaagtaaacgtggagaccttgctggtgctgccgctgccgttgacacc

SEQ ID NO: 39152 - DNA, 404 bp, Oryza sativa
  Clone ID: uC-osroM202011b05a1
tttgttttttttttttttttttttttttttttttggggtggcacacggccatgaacggctgagatcgcacacacatagagacagacaatgtactctcagaaacgcacccattacacgatgaaaaccaatcaaacacgaaaaaaaaaaagcacaaaagaccgacaaacaacgcctgggacgacggaggcatgtgggggccaaagaggggcaccgggtcactgacgctgggccccaccgccctcgatgacaaacttttttatttagccccacgtaacgcgtacccacacacacctacggagtcgagtactaccactccaggtaactcaacttatcactcggtacacgcacacgtacgtacaactccggggagtccccggcggcggcggcccgcgcgggccatgcat

SEQ ID NO: 39153 - DNA, 519 bp, Oryza sativa
  Clone ID: uC-osroM202011b06a1
gttcgcagcacgcgggcagcgctcatactgccactgctcggagcggtcgccgcctgctcaaccggcacctgggccgaactgacccgcgtaaccgcacgcttcaacgatgaatgggtgtgggcaggcttgctggtcgtgctgaacctgctggtgctggcccatgctgcgctgaccctgagtgcgcgggaaggttggcgcgaacgggcattcaactggctggagcaacgcgcaggctggctggtggcaatcgccggcttcgccggcgcggtgatgatgctcgcactggtgtttgacccgcgctatcgcagcttcccgagtgcggcactggtgttgccggccctggtgtatctggttcgcccggccaccgggccacgccgggagatcgcgctgctggccttcattatcggtgccggcattgcgccgcagctttatcgcgagggctgctgaaccagcaggcgtggggttgggcgggggcagcgtgatgatggctggagcgttgggcgttgcctgccggtgcgt

SEQ ID NO: 39154 - DNA, 465 bp, Oryza sativa
  Clone ID: uC-osroM202011b06b1
ggccagtgctgtttcactcaaaaaaaggctgccgagtaaggcagggcagcgcaaggaacggagcatgacttaatccctaagaggaaacgtgctgaatgaagttcgcaggctatgaccaccgcgttgccaccgaagtgccagccttcggcacgaaatgtcggaaaaaaacgtcggaatcggggtaatagcagccagaagatacacgttgccatgcattgatggacactaattgtgtgtatgcgccttgctaacggctgccggcgcattaagctgagcgccgtttttgcctatcggagtaccccatgtcccgtcgtttgccactgatcctgctgcttattgccctgccgctatggttggctgccagttatggcgcacgctacggttttatggaggatggccagtgggtgggtatctgcgttgatgaggccagtcgctgggaatgccagttgcgttcgaccttggggt

SEQ ID NO: 39155 - DNA, 471 bp, Oryza sativa
  Clone ID: uC-osroM202011b07a1
tttgttttttttttttaccaacatatgcctttgcattgcccaaatgacctggtatattacagcatttatgttccagcattgttcaattcttttgccttgtgcgcgatgcaatatcaacctataacctttacacataccagaggatttacttccatgaagctggaatctaaagactgtaaacataactcgaatggatcataactatcctgcagctgtaccttgtagcatgaagtagagatttagcttagaacacagggcaaacgcttgttggacccaagtcaaccccttttgcagtgggacatgtggccagtgggcagtgttctcctgccgtgccccaccagtcgatgctccggttctccatggatagtgagaagtacagcagcaccgccatgaaagccacgccagcgtctagtgcggcagagagaatgtagttgtacctcttccaccactttttccggtaccggaacacga

SEQ ID NO: 39156 - DNA, 286 bp, Oryza sativa
  Clone ID: uC-osroM202011b07b1
ttctgctacactagctctctctctcctgtggggagctaagcgggaggcattaaccccccgcgtcacgcgcaatgggtgaggcagcggcggacgagcgcggcctcgccgccgccgccgccggggaagacgaggaggagacgtcgccgatcgaggaggtgcggctgacggtgccggccggcgacgacacggcgctgccggtgtggacgttccggatgtggagcatcggcctcctctcctgcgcgctcttgagctttctcaaccagtttttcttctaccgcaccgagcc

SEQ ID NO: 39157 - DNA, 447 bp, Oryza sativa
  Clone ID: uC-osroM202011b08a1
aataacgaaagatacagaaatagattatttcttggtctactaaatttcttatgactgcaaggcagagatggttacaccagaatgccccttgcaagcattcgggaactgcagacagtctactggatagtccataaagttacatgagcaaactgatgcaacggttacacgaaaaatacatgtcacatctaaaatcatatgtaaggctgcagatttgcccaacaatgtgaaaatggtttgtcataagaaactttaaacaaacaagctggactaattacaacggcttcagatgtttggtggggcttaggacctatacgggtataccattccatctccagtcatattggagcaaattagaagcatatgcctgacagctacgaaaatttagcagtgcaactgctgaagccaaggaaaaatgtttccgggaaggatgaaaatgatgaacattta

SEQ ID NO: 39158 - DNA, 485 bp, Oryza sativa
  Clone ID: uC-osroM202011b08b1
ttgataaatcaccttatgctatgctgaccgatgatcgcagtaggacaactgaagaagctggcaaagatgcatgtgcttcccgagttgtttgctcagatgctaatgaaaaggcggcttgctcaagtgaaaatggggggagaaattcgttcaaccctatgaatgctttgattgaaatcaagtactctgaagctagtcattccttgcaagctggagatgatacagcaatgaatcttcttgccagtgttgctggagaaatatctaaatctgagttgatttcttcatctgcttcacctagaaattcaccaggaaatgaagagggctgtgaaggagataacattgggaagctaaaagtacaaagtgatatgggcttgtcacggcatgcagggccaacaaatgatgctgagaaaatcatctctgatagggtgagaaaattggtgcaaggttggtcgcaaaggaggaacaacacctatgggatgcaaaggaca

SEQ ID NO: 39159 - DNA, 414 bp, Oryza sativa
  Clone ID: uC-osroM202011b09a1
ggaaggacaaacaccatgaatctccaacgaaataaattacattggttaactcaatattccaatataaatataaaatcaaaacatcctacatcccacttatggacgagccacgcccacacaaaaccaatcaaacggggctcctcctattcctgcaattcgtcgagcgccttgggcaggaacggtttgaattttggcacattcaccgggacgccctgcttaatgacgatctcggggagggccggccagccctgcgcggggatggccatggggcccttgaacacgtaggggcccctggggacctgggccttgagcgtggtctcctcctccgagacgtaatacttgacgtaccggagccgcatgtcgcgcgccggctgccccgaaaagtttggggccatccagaccattttgccccac

SEQ ID NO: 39160 - DNA, 196 bp, Oryza sativa
  Clone ID: uC-osroM202011b10a1
gaaagaatcacaaattttttgaaagaaccggtggaatcccagttccccccgacaaccttttccttgaacccacaggatccggagcaaatcccatggacccccttgggacggaaaagaaagggacccccccgcctccatgggcaccaaggggaacgctcccccgccaagcttttggcccggcctaacaaacgcggga

SEQ ID NO: 39161 - DNA, 361 bp, Oryza sativa
  Clone ID: uC-osroM202011b11a1
ttgtttttttttttttttgggtttttttttttttttttttttttttggaaggaatcacaaattcttcgaaagaatcggggtaatttcagttctacacgacaacattctcctcgaacccttctggctccggggcaatctccctggaagccctcttgaaggggaaggaagtctttcctccgcttccatgggacctagttgaatgtttcctggcaagcatttgccctgacgaccacccggtttaaaggctttgggcccggtttccttgaaggaaagcagactgcccggagccccgggaagaagagctcctgaggcttgctgaaatggagcgggacccccttcgcaaaatctttagcgggttctc

SEQ ID NO: 39162 - DNA, 191 bp, Oryza sativa
  Clone ID: uC-osroM202011b12b1
ccgtaatccccgggtcgtcatcataccctttgcacttgtacctcatatgggacgtgtaagtgagcaattttaaagtgtaatgggggtctctaacgttcgttgccggaataaacaccttgctccaaacattcttcgcttctcatcctccccttgcgatgcgtgacttataccactttccttcaccaaccatt

SEQ ID NO: 39163 - DNA, 443 bp, Oryza sativa
  Clone ID: uC-osroM202011c01a1
caaaaagttcacttttcattaacaggaagacgatccagtatccaatagcagcagaaacagcgaatagcacaagcgaaaataaagacaaaggaattagcaatgtatactcgcattccacaacagtcgaagggcaataataagtcttaacatccaagtttaaaccgaacagaaaatagagttttaaatgactgacatagtgcacaaagcgagcagatattaacggtcaatgcaacaactgaaatgaccgtcgacaaaacttaacgagtactaaaagagctagatatctcaaatgcagatatggaaagcaccacttgaacgaggctcatttcttcttggcggcagccttggtcaccttggcaccggttgggtcctttttctccacgttcttgatgacgccaacagccaccgtttgcctcatgtcccgcacggcaaaacgaccaaga

SEQ ID NO: 39164 - DNA, 421 bp, Oryza sativa
  Clone ID: uC-osroM202011c02a1
tttttgtcataatcattttgcttcttaatctgtgggattaatcttgtacatttcttttctgcgagacacaaatgcgcaaaccaaaagaaagaagaacccaaaaaaaaaaaatctgatggattttacaatggcgctacgccgatcttggccaaaccgaatcacccgatcgcccccacacaccgagctcgctggccccacaccgagcacgacaccggcaaacacaccactcgagcgctcggccacccgctgccgccggcgccgcgggggcagcagcagaagcgaccgaagcgcacaccgatttggagttcgcgcgctcttggaggtaatgatgtgttggcggactggtggcggcccgtgcaattgggcgacgtcccccgtgttcccctgcccttttgacccaagaatttcgggtggttttcgc

SEQ ID NO: 39165 - DNA, 464 bp, Oryza sativa
  Clone ID: uC-osroM202011c02b1
ttatatttgcatcgttcttgggatgctttttaggcttgtttgagagggtggagcggtgacattcacgttcgtgaaccggtgcacggggacggtgtggccgggcatcctgtcgaacgccgggagcgcgaggatggacccgacggggttcgagctgccgcccggcgcggcgcgcgcggtgccggcgccgaccggctggtccggccgcctgtgggcgcgcacgggctgcacgcaggacggcaccgggaaggtcgtgtgcgcgacgggcgactgcggctcgggcacgctggagtgcgccggccgcggcgcggcgcccccggccacgctggcggagttcacgctcgacggcggcggccgcaacgacttctacgacgtcagccttgtggacgggtacaacctgccgttgctggtggagccctcgggcgccctcagcgcgacggggacaacttgcgcggtcgccgggtgcg

SEQ ID NO: 39166 - DNA, 478 bp, Oryza sativa
  Clone ID: uC-osroM202011c03a1
agatacgcaatatgagcacaactatataacttaataagcacattacagcacacacatggccaaggcagttatttgaatcagtctccaacatacttcaaatcatagaccacaccatacagcaaacatagtataaacattgtcatagagagtacagctgatagcagcttgtaatattctagcattactttggtagcatccctctacaaaacatagcagacatcaccagctcttcatcttggccatacacattcaacatggtttgctagtgacagaccacactgaccagaacatttcgtctcctcagtaggcaccagctgccatgagcagctcatcaaggctccagatgccctcgttgcttgccccgtcttgtgtagcatcattttgcagaaggttgtccattgattcatctgagctgctctcaacataaggtaatggcaaatacttcatctcgggatcgaaggtgggcatgttttgggcg

SEQ ID NO: 39167 - DNA, 536 bp, Oryza sativa
  Clone ID: uC-osroM202011c03b1
ttcgtgagcggcagcaagtgttcactgcgttcttcttctcgatttatctttcttggtttcttgatctgtagcttattagcggccatgtgcggcggagcaatcatctccgggttcatcccgccgtcggccgctgcggcggcggcggctgcggcggccaagaagcagcagggcaggagggtcacggccgacgtgctgtggccggggatgctgcggaaggggaaggcggcggcggcggaggaggactttgaggccgacttccgcgagttcgagcgtggcatgagcgacgacgaggcggaggggggcggcggcgaggaggaggaggacgacgacgacgtggtcgtggtggtccccccgccggcggcggcgaggttcgtcgtccgtgccgcggccaaggcggcgcccccaactgcagatgggatgttgactacaaagcttgtccaacatgatggacctactgctagatcagcaaagcacaagaggaagaatcagtacagggggatcccgcagcgtccttggggcaaatgggcagctgaaat

SEQ ID NO: 39168 - DNA, 422 bp, Oryza sativa
  Clone ID: uC-osroM202011c04a1
tttttgttagatacgcaatatgagcacaactatataacttaataagcacattacagcacacacatggccaaggcagttatttgaatcagtctccaacatacttcaaatcatagaccacaccatacagcaaacatagtataaacattgtcatagagagtacagctgatagcagcttgtaatattctagcattactttggtagcatccctctacaaaacatagcagacatcaccagctcttcatcttggccatacacattcaacatggtttgctagtgacagaccacactgaccagaacatttcgtctcctcagtaggcaccagctgccatgagcagcttatcaaggctccagatgccctcgttgcttgccccgtcttgtgtagcatcattttgcagaaggttgtccattgattcatctgagct

SEQ ID NO: 39169 - DNA, 394 bp, Oryza sativa
  Clone ID: uC-osroM202011c06a1
ggtggttgcctgcgggaccgtcgccgacgatgccgctgccgccgcgggcgccggagacgcggcgggcgtggtggtggctgcgtgggaggaggagttcgagagcacggtgacgctcgctgccgcgtcgcaccgggagcacgccgcgttccagccatgggagctcgccttctccgtgttcactgctgccaacagaggaccaaagatcaagccatcaattcttggaactgcttcccttaacctagcagattatgcatccgccgccgaagagaatattgagataattctcccattgtccgtgccaaatggttcagctgagtcagctccctcgctacatcttaccctgggtatggtggaaataagggcttttcaggaaacatctgatgcttcacaaagg

SEQ ID NO: 39170 - DNA, 414 bp, Oryza sativa
  Clone ID: uC-osroM202011c06b1
gggctaacttaagtgcattactgagtgattaaaaacacaaggttcttgatggttacaaatccggcacttgagaaaaatatgtaggagcaaacacctatttatacaaaatgcaggcagaaagctcctaggcctggacaaaaacctatagtagttagttcatattaggcaggatacgagcgcaaacataaaggacacaaaatctccagcaagtatgcatgcagtggactgatgtcaggacagatcaccatcaggaagctatacaacagcaacagctggtgctagcgcgatctccattgccggtggtggctcaggccatgagaactcaaaaggggcttccatggttagaatttgaggggctgaggtaatctcctttggggatgatgcagtgtagtggaactctatttgaaaccggtg

SEQ ID NO: 39171 - DNA, 508 bp, Oryza sativa
  Clone ID: uC-osroM202011c07a1
ttgttttataggttcataacattatttggccatgcattattgcccacttcttttcacacttttacactgctgcatgcactgcagccatcttttacatattccacaaaaacaggggaaaaacttctctcctctccctcttttctggagacaaagaaagcagaggagaagcaaacagatcagtcgtagtactagtacaacattagcacactctccctccagctagcgcatgtaatataatacaccagctgcgccatatacatatactatcagttcatcatcgatcgcatcgtgtacgtacactacaggttgtgtacgtacaaggatcccctcttctgctaagactttttgtctgcatcgatctactacgtacacgtacgtatattatacggtggtagtacaagcatgcatacgtttatacatccttggctacaaaatcggcagtctgtagtagtgcagatagctgaacactgaacatttcatgctctggatcgacgagctgaacttaact

SEQ ID NO: 39172 - DNA, 400 bp, Oryza sativa
  Clone ID: uC-osroM202011c08a1
ttggttttttttttttttttttttttttttttttttttttttttttttttttttttttaagaaaaactttttttggtgggggtaacaatagaatttttttttaaacacaatttggcccacaaaacaacaacaaaaaaatttccccatgatgaaattgggggggggaatattactaattctacatggataaacccggtggggaggaaattatttatatcctataaaataaggttaattattggtgggcaaccagaagggggtggtgaccatgaagcccttttttttgaactttccctcggcacccgggggcccgttgaagttgcccattttcaccatggggggggggaacttgacctggaacacctttttgacgggggaggggagcttggcgaccccgggg

SEQ ID NO: 39173 - DNA, 444 bp, Oryza sativa
  Clone ID: uC-osroM202011c08b1
ttcaatctaaatccatccatcgatctctcaagtaattaacctcaagagagaaggaattaattgagctagctagctagatagtgagataaatagtgatcaatagctaagctagctagcttcgatcgattgatcatgatgaggtcgccgtggatggtgtttgcatgggcggcggcgatggtggccgtggcggcggcgtcgccggtgccgacgaagctgaaggtggggttctacgagcacagttgcccgcaggcggaggagatcgtccgcaacgccgtccgccgcgccgtcgcccgtgaccccggcctcgccgccggcctcatccgcatgcatttccacgactgcttcgtcagagggtgtgacgggtcgatactgataaactcgacgccgggacacgtggcggagaaggattcggtggcgaacaaccctagcatgcgagggttcgag

SEQ ID NO: 39174 - DNA, 323 bp, Oryza sativa
  Clone ID: uC-osroM202011c09a1
gcccctcaaacccttgctgccgccgccgctcgctccccctcgtcccccactctctccctctcccgccgccgccgcctcgcgccgccacctccgcctcgcgccgtcatcgctgtcgcctcgcgccgccacggacgtcgccgcctccggcttccccgtcgccgtcgaccgcccccgccaccatcgcgggcccccgaaaccctagtcgctgccgcccgctccctctcgtcccaccccctccctcgatgctccttctcccgcgacgacgtcttgaggtacgtggtgctgagcacgggggcgaactgccgggggaggttggggggggg

SEQ ID NO: 39175 - DNA, 408 bp, Oryza sativa
  Clone ID: uC-osroM202011c09b1
gaagctgttgatgggtaattttgcatacatcgttgtacagattctgctgagaacaaaactcttacacattacaatctaaagatgaagcaccaatgcatataaaaaatgaaaataaagttttacataatgatcggaataatgtgtccatggtgatggtacaactatatttgatcatacaaatctaccagtcaaaagaagacattgtggcaataacattctccgctgaaagattaacatctggagtactaattgcaatggacctttcatcgcttgagttgcctgaagctgaaagccattcaagatccagaaagtttgaatcaccagaatgaatgcaactttcagtttcaacacctaaaacatgatgtattctgggtaccatgggagtataccttaagtttgataccttac

SEQ ID NO: 39176 - DNA, 430 bp, Oryza sativa
  Clone ID: uC-osroM202011c10a1
ttgttttggagatcagaattggatccaatcgattggaaatgagcagtacaacaaacctaatggatctgatgcatcatacttcgccacaagcgagtagatctatctcagatccagattacatttcatctcgagattacaattcgggagaaaacgcaagaaaaaaaaaagcagagatggatggaagcaagggatcaatcctaaaaaccagatcccttctaaattcttctaaatttcctccgcaacgagacgaatcccaccccggattttatatacacgccatcgcggcgacgtcgcgagctgtgggctccatctccctcctccggtggcggcggcagcggcgcgcctaggcggagcgggcgaggcggaaggcgatggcggagtggtacatggcgtcgtggaagctctccgtcttcaccattcttgcgcgcag

SEQ ID NO: 39177 - DNA, 330 bp, Oryza sativa
  Clone ID: uC-osroM202011c11a1
ttgtttttacaataaaaccaagttaacttctgtgtaaaaatggagcaatggatcatgcaaagctaacatcagttattattggtacacatatctgtactccacagaaactcccaatggaacctcttattgagcactccacaaatatggagcctgcaggtcactctgcgaggttccatctcaacttttcaaaactgtaagaacaaaaaatttaaaaggtacacgtcggtatcgtcgtgtctctctatgcctcggcgccgagttccaacataaaggtgtggttcgcatcgctgcttccagggccactgaactggatgggaccagggctgatgt

SEQ ID NO: 39178 - DNA, 311 bp, Oryza sativa
  Clone ID: uC-osroM202011c12a1
tggttttttttattttgacggtaaacactggtcatttactcgggaataaaacatgtcaaggtgactctgactcctgagtcgtcactgactctctatggtgagcgaatttataacgaatgacataatgccatatgcataatttacatggacaaactccaactagtgctgaactgctgatcagagaacgagggagaggaagatcggggacgccagcagcagacgcgcaaagcgcccggcgagcgccggacatgacccttgtcggcggcgttgaagggggtcagcgcgccgccggagcttcccgtccccgggaa

SEQ ID NO: 39179 - DNA, 447 bp, Oryza sativa
  Clone ID: uC-osroM202011d01a1
ttttgtgtttttttaactacaataactgagttatctattgttcagggatttttgttctaaaacaactgattagccttgtctgattggcattacatgtaaaagataatcatacacccattgcaatgcatatttgcttatgtcctttactgcagaaattagcacaatgaatcctttctatctttgatttgtgccttggactgctaactttggaatgtacggcaactgcgaccacattctttgggaccaaaacttctgatgattaggacataatttacacatgtactaaagaatcaacaaggacgcagtcacagcaacaaaagccatcttgtgggcataaacggcctcttttggccccaagggaggaattgacgacaacatcctgcaccatatctttggttgcatgtgaaggcacgcggcctccaagagcgaaccaaaaaccataaattt

SEQ ID NO: 39180 - DNA, 462 bp, Oryza sativa
  Clone ID: uC-osroM202011d01b1
ttatctcccccctcccccacacacatctcccgggctcgatttaaccctcctgcggggtcgaacacgacaacgccttctcctccgcctactcccccaacgcatcgccccaccccatccatccagattcctccctcctcctcctcctcctcttcctcctcccccgatcccgccccgatgcgatgcccccgcggcgcgatcgcgtgacgccgccatgatgaatcccgacggcggcgacggcgaccgcctccaggcggcgggggcgggctcgtcgtcggcgcagccaggggcatccgacgatggagtggcggttcgcgcaggtcttctgcgagcgcccggccggtgaggacgtgcacgaagttgacatcatctctgcaattgagtgtgataaatatggtgatcatcttgccacccgagacagaggaagacgcgttgttttatttgaaaggacagatgctcgggata

SEQ ID NO: 39181 - DNA, 449 bp, Oryza sativa
  Clone ID: uC-osroM202011d02a1
acccaagcaagttaattactgtagtaaatatttacacgtcttttaaattcaaattcaaattctcctcctcctcctcctagctactgctgctgctgctatcctatgatgaagtgaacacgtccgtttaatttctttcctgtccttgcaaatgaaaatgcagagaactcaaactgagccacttgagctccatgtcgtcttccccggcgagctcagcgacgacatcttgctcctcctccggtgatcgatcaggctggccgttgccggcggcgagctcagctcgctttacgccggctcgcgcgggcgcgccgcccagagcgagctgagcgcgcggaggcgctggcagtagtcgccgagcgcgaggagcccgcgcgccgcctgcggcagcgtcaggatcttgtacatgttctgcagcgtctcctgcccgagatggtcggcatggtcgacgaacg

SEQ ID NO: 39182 - DNA, 422 bp, Oryza sativa
  Clone ID: uC-osroM202011d03a1
gacaaacaaactgcgcattacaaaatgcaaataagcacttttgcattcaccaagttgtagttgaagcaattacagggttacactttatcctcctgattctagaaagcatggacctcgcatcgaaaatatacagccgggcccaggatttggatcagaatccaccaaaaagaaacgaagtttgccgctgcaacagccacctccatccagttatctagactgcataaaacatatttcaccttctaaaggtggacttaaaatggcacggaaacaactatctacctgacactaaggtgattacgattagctccaagttgaattaacatcactatcatccgcagcttccatgttacggagtcactgacacctgtacaataactttacaatttaaaaaagggttgctctgtaaaagggaccaacccaga

SEQ ID NO: 39183 - DNA, 505 bp, Oryza sativa
  Clone ID: uC-osroM202011d04a1
tttttgtaaaactgaagcaggggccaagatatagacacaggattgaccataacaataaacaccaataaaaaggcaaacagaaaaacaggaagtgccaccaagcagttcaagaggctcccccacccccaaccaggcctggctccacagacccccacctgctctgctacgagtagcttaaaggcgagactgcaaaaccatcgctagcaacctcacatacgggggagccccagatttcccgacaacaatcacagccacataggtgtcattacacagttaccaaagcactagctacaagcttttagggcacataaagccggctttactgcccctcgctggagtcgcgcttcggagcttccctgatctcttccgcggtgtcctccgagatgtctgaagtccacagggtcaggttatcacggaggagttgcatgatcaaagtgctgtccttgaaggactcctcgctcagggtgtccagctccgagatggccttatcaaaagcctgctttgc

SEQ ID NO: 39184 - DNA, 380 bp, Oryza sativa
  Clone ID: uC-osroM202011d04b1
tctctccccctctcgaattatgatctcttccgggagaattttaaattcgtgtgcgggtgttaacgttcgattggatcggtgctggtagtacttgctagcatgatcccccacgtgatctgtggccgattgttgggatcgtttttcatcttaatttttatctcaaccctgttgtattccgtagcaatttttttttgctaagccatgcttttaaggcatgtttgtatgcacaaaatgatccgggtctctggtggatttgaagtgatctgtctgcggctgatgtgaattttaccgaatatgagtggatccttcaaaaacctgagtactgatagtgttctgaggttcttgaccaagtttgcttttcaaaattttgccaataattt

SEQ ID NO: 39185 - DNA, 77 bp, Oryza sativa
  Clone ID: uC-osroM202011d05a1
tgggttttttttttggaaccgatatatattttttcttaatttgtattttccttgtttaaacacttttttataaggca

SEQ ID NO: 39186 - DNA, 395 bp, Oryza sativa
  Clone ID: uC-osroM202011d05b1
tttctccttagttgatttcatcttcagttgctggggctttttaacagactgagggaggatgtcttgcagctgtggatctagctgcagctgcggctcaaactgctcctgcggaaagaagtacccctacctggaagagaagagcagcatcaccaaggccaccgtcttgctgggtgtggcgcccgagaagaaggcgcatcactttgaggctggccgcatagtccggccagaccgcccatggctgcagctgcggttccagctgcaggtgcaacccttgcaactgttaaaatgcctgcctgcatctaccatctatgtgaattgggatgcagaaaaataaacaagcttggccatttgggctggtgcttgaccaatatatatggtgtgtgtgtgtgtgagtg

SEQ ID NO: 39187 - DNA, 487 bp, Oryza sativa
  Clone ID: uC-osroM202011d06a1
tttttgttttttttttttttttttttttttttttttaaaaaaaaccagccccaattggtttttcaccccaccttttcctggttcttttttggctggaaacacatcattgacaaacttaatatcacacaggtgcttggcctagagaggggggaagagagagagagaggggaggcaaaaagggtaaggggaaaaaaaaccgggttgcaaaagtccccacatttcctttaagtagatccccccaaaccttttgcaggcagaaccagttggtgtttgcagcataagcagcaatttcaccacaggatttttacacagggggaaaactggttaagccaatgggctctgcttttttggcgggatctcaccctaattaaatttccttgtttaaaccccttttttaacctttggccctgggggttttttgctcctggggaagcctctcccatgaaccttaggccaggaacattttgcctgtccttccacccggggg

SEQ ID NO: 39188 - DNA, 467 bp, Oryza sativa
  Clone ID: uC-osroM202011d07a1
ttgagagttcagttcttgagttctctggaggaggagcagttcatccctttctctccttctgactttaggtttttgaaggcccccttgtgaattccctgttgtccatcagacaaggaggcctcaagatgtacatcatagaggacaaagggggtgccattgccctcatgctggcctccctcttcttcctggggacatggcctgcggtcctcaccctcctcgagcgccgaggccggctcccgcagcacacctacctcgactactcgatcacgaacctcctcgctgcggtcctcatcgcgctcaccttcggtcagctcggcgatagcaagcccaacatgcccaatttcttcacccagctcagtcaggataattggccttcagtgctgtttgcaatggcagggggtgttgtgctcagtatagggaacctctctactcagtatgcatgggcatatgtaggtctctcagtgact

SEQ ID NO: 39189 - DNA, 497 bp, Oryza sativa
  Clone ID: uC-osroM202011d07b1
gaaaccaaaacgggtactatctatcttatcattcaggtgaactccaaatttccctatgctatctgcaaacgggtctttcagaattcagagaaagggataacattacatttatataatctgacacaaacttaaaatcacaaatccacaaactatcttagtttgttccttttttccccttatgtacagctccatccaaatggaaatttcatgaatggagtttcattccatgttggcatgatctgcttcctggagacctggactgaagtccccccctgcattgctgcctgaacttctttgttttctgacagcaagagtggtttgcgcttgcaaacaccaaattaaggcaagagatgaaaggatttgaatcaatcacttggtgctcctgtgacctgatgaagccatgagcaccgcgaccgcgacgatgaacatgaacagcatgaaccccagcaggatatacgtctttcgcgacgatttcccgtacttcccaaacaggagta

SEQ ID NO: 39190 - DNA, 427 bp, Oryza sativa
  Clone ID: uC-osroM202011d08a1
accccaaaagacaaaagaattcaataataatcaaccaattaaacacactcctctcaaaatgcgctgtccaacccaacaaccgtgtgagagctaggaaaaaagaataataatcgctgtgttttgctgtatgccgtgtcatcacttgtcgtgaacgcggtgtgcccattagtccctgttcctctgtagactgaggacgacgcatcatcgccgtgatcgatcgagaatggatcggagatggacggacggacggagggacgggtcagtcgtcgtcggagtagcagcggttcatctcgaacgcggcgacggcgatgacccagacggcgacgaagacgccgtaggagacgatgtaggcgctgacctcctgcgcgatgtgcaggccgaggaagatgttgccgatggccaccaggatcgccgcccgcccgatgta

SEQ ID NO: 39191 - DNA, 412 bp, Oryza sativa
  Clone ID: uC-osroM202011d10a1
ttgtttttttttttggaacaaaagagtaaatttcttaattgaattcccaggtttaaacactcttgacatgctttcaggttcagacaccaaacatactaaaaaaagctacacctgcccaacgcaaaagagaacagaatataaaagaaaaggaactgcgcaaaccaatgatccatcattgaaaaccaaaagtccaaaaaacctttactggtatccgcacatctcaccagacacaatcagctaaacttctagctctcctatgaaaccacctccaagtcctaaccaaaagcaacggagaaactcacaaggaaactcaaatggatcttgaattgccttgattggtggctttccaacctatataggcctttaccttacaccaccccttaaaggctgaaatgatgagaaaaaacttaac

SEQ ID NO: 39192 - DNA, 383 bp, Oryza sativa
  Clone ID: uC-osroM202011d11a1
ttgtttttttttttttttttaaccaaaacataggagggttcatttcttcttctcaaagtagtgtagcatctttccttctttcaccattacataagcttaagcaataacagataacaaatcctcctcctcctctaggtaaaatattcaaacacaatacccttataagtacttattattaggaaagtagcgtgcatgggcataaatggcagcggggggcaggttaagaatcacaatgctgagcagcgaggaaacaaaacaccataatgggacagagcaaaagcctccgaaagggagcttttaggcagaaggcttctcccacttgaggggctttaccacctcccaggtgaagtctgggtcgccccttccgaagtgaccgtaagccg

SEQ ID NO: 39193 - DNA, 474 bp, Oryza sativa
  Clone ID: uC-osroM202011d11b1
ttttcggatctaattaatttacctcctccacgtgctccttttaaaccccgatcgggtgggcccggctcctcctcctccgccgccgccaccgccgccgcagataggagaagatggccgcacttgataccttcctctttacctcggagtctgtgaacgagggccaccctgacaagctctgcgaccaagtctcagatgctgtgcttgatgcctgcctcgccgaggaccctgacagcaaggtcgcttgtgagacctgcaccaagacaaacatggtcatggtctttggtgagatcaccaccaaggctaacgttgactatgagaagattgtcagggagacatgccgcaacatcggttttgtgtcaactgatgtcggtctcgatgctgaccactgcaaggtgcttgtgaacatcgagcagcattcccctgacattgcacagggtgtgcactggcactttaccaagcgccctgaggagattg

SEQ ID NO: 39194 - DNA, 297 bp, Oryza sativa
  Clone ID: uC-osroM202011d12a1
tggtttttagcgacaataggttacaaaagcctcttgctttgccgccatggctggcaagctgagcagagcagctaacacaaagaacacgagatcactataaaccaaacggcaacgaacgaagaaaatacagggtcttttttgtctgaagatacacgaagcggttcggtttcttttatttttagtctcctctcctcctcgatgatgggtgtatggcaatggcaatggcgatgggatcttggcttagttgatgggaaggggctcgccggtccactccttgaggcagtcgagcatggggtt

SEQ ID NO: 39195 - DNA, 470 bp, Oryza sativa
  Clone ID: uC-osroM202011d12b1
taaccttctcctccgggtcttcttcagtatgggatcctttatactcctcgtgcccaccaccaccaccgtagcaatggcgggcaacgggccgatcaacaaggaggacccgctcaactggggcgcggcggcggccgagatggccggcagccacctcgacgaggtgaagcgcatggtggcgcagtttcgcgagccgctggtcaagatccagggcgccaccctccgcgtcggccaggtggccgtcgtcgcccaggccaaggacgccgccggtgtcgccgtcgagctcgacgaggaggcccgcccccgcgtcaaggccagcagcgagtggatcctcaactgcatcgcccacggcggcgacatatacggcgtcaccaccggcttcggtggtaccttccaccgtcccaccaaggacggtccccgcctccaagttgagctcctcaggcatcttaacgcctggaatcttttgaattggc

SEQ ID NO: 39196 - DNA, 333 bp, Oryza sativa
  Clone ID: uC-osroM202011e01a1
gttgtcgcttgcgtgttcttctccacattataatatgctgttgcaaactctaatacgattacacacgatgattaactttcggcatgcttgtactacatagttactgtagcataaagaaggtttagtacgctcccattttgaaattttatttgggtcgagttcccacccgtattttaaaaaaaaatttaacccgggctagcaaacgcccttggttttgccggcgacgagcgggacgctcttgcgcacgggcacggccttgctcttgaccaccctgatcgaggccttctcgccggcggaccgggcggggccgagctcgatggtgagctgcaccct

SEQ ID NO: 39197 - DNA, 312 bp, Oryza sativa
  Clone ID: uC-osroM202011e02a1
cacattatattatgctgttgcatactttaattctattacacacgatgattaactttgggcgggcaagggctacatacctactgaaggagaaggaagggatagaacgcatcccattaaagaacccctattgggggggaagaaccacccgtatataaaaaaaagctttaaccggggctaacaaaggcccttggaattgccagccactagcggtacgctcttgcacacgggcacggacttggaatagaccacggtgatggaggcctgcacggcggttatagggacggcgccgacctccaagaagagccccaccct

SEQ ID NO: 39198 - DNA, 356 bp, Oryza sativa
  Clone ID: uC-osroM202011e03a1
gatacaaaacaacatccatatatgagccagttttatagacaattcagggttgaattgagtacaacagcattacttggatgcaggtatgaatcagggattgccaaaagttgcatcaatcgcctaccaaatttagacagatgtcatggagcacactcaaaacgcataaaactacattgtacagctgacttgccaattcttgtttatggttaaaatgataatgctgagatgctagattcagtaccccggctggggagttgaatcttctttctctgaaagccagagcgatgtactgaattcttctctcagaggctggcagtgttgggttgctgttcaatgatgcacaccacaagctttac

SEQ ID NO: 39199 - DNA, 555 bp, Oryza sativa
  unsure (1)..(555): unsure at all n locations
  Clone ID: uC-osroM202011e03b1
gttcgtatttaaaacttttaaatattttacatgggtttgttgatttggccctcattcaagatgctctaatactgaaccaccttctggtggcacaaaggaatgatctcgttatcggttttccttgttcatgtgactctggcatcttacgtagcatcaaaccaaataggtggttgttttatgcaattggtttcaaacacacaaaccatcataaggagccattgaaatatgcaaatttattcagtattataaaggcaagcaacgaccctatcatgacctgttctcttccttgttactgattgtgccgtggtggattttgtttttctgcggatatgataacttcaattagttctcatccaagaatgtagtcccttccagtatcatgctaagtcgctattgcataagctactatttgcatattcgntccatctgacaggcttgtgatgacggctgtgacgttattcattgatgaggatgcaaatctggttgacactagaaactattagagtttgctaccaacttttcacacacagattgctaggaaaatgtgtaagatgc

SEQ ID NO: 39200 - DNA, 395 bp, Oryza sativa
  Clone ID: uC-osroM202011e04a1
ttttgttaaggcatcaaaggtccatgcactaattggacgattaatccagggaagaaggcatcaaaggtccatacactaattggacgattgatccagggactttcaatagagaacacatcgactctgttcggcggcatcgctgccgcagcagttttgaactgctgcagccgcagccgctgctgtaaaatgccccctccgaacacacccatagtttatttgctcctctagatattctggaggaaaagacctcagcggaaacaagagcccatcaagccccaaaccgcagttcttgcttcaccaaccaaataggctgtcttttactgcaatacatgattcctttattccaatatctgcgaatgcagcaagtaaagatatgatggataagtgtatgggga

SEQ ID NO: 39201 - DNA, 516 bp, Oryza sativa
  unsure (1)..(516): unsure at all n locations
  Clone ID: uC-osroM202011e05a1
tggggctccttccaaaccacctccgaggnnaacgtcggcggccgccacgtcgtccccggcggcgtaacaacgacacaaaaaaatgaagccccgaaaaacgtctctgtaccagccactgcaaccaaatctctgccccaaccccaggacaagcttctcggaggactactctctgccgcattcgaagaatcctcatgtcagagcagatacaaatcatctctctaccggaagaagtctccgttccctctgtccccttacctggttcagaagctgcggaagtacgaggcctaccacaagaagtgcggccctggcacgaagcgctaccggaaggcgatcgagcagctcaaggcggggcgcaacgccgacaacgccgagtgcaagtacgtggtgtggttcccctgcaacggccttggcaaccgcatgctcaccattgccttcacctttctgtacgcgctcatctccaaccgcgttctcctcatgcacgttgcggcggagcaggagggcctcttctgcgagccg

SEQ ID NO: 39202 - DNA, 434 bp, Oryza sativa
  Clone ID: uC-osroM202011e05b1
ttttggtgacgttacaaacgcaattcggaacgtgaaaccgaagaagtcacttctccaaaaaattagctatcgaacaacttgagaccgaacccgacatcctcgcagtgccgaacgtacggcttgacggtggccgcgtcgacctccttcttggccctgcacgagaggatcggcggtgagtggaggcacggttccaccgacgtcgacctgacgcacgccacctccgacctctccttgtcccagtccggccggagcaggatccacggcttgacgccggcagaagctgtaggccacgtacccgaacgttgaccaggcgctcatggcgatcttgtcgcaggagctgagcagatagacctcggccagcgccttctggttgtgctcgctggacgatgactgctgctgcttctcgtggctcggctggtacaccgggacgatct

SEQ ID NO: 39203 - DNA, 425 bp, Oryza sativa
  Clone ID: uC-osroM202011e06a1
tttggttttatgtgatgaacaataacttcattcattttcacagcatacaaaaatatgatcatgtatctcctgcatattacacaaggaaaaataaattgccctaggtagatattaactgcaggagaagagtttaagtttgggattgctctataaaattacaatgcaatgcatgacactctgtccaagcttgcttgaagtccctcgaagataatagcgcaaggaaaaggggaaatgaccagagggagatgtatacaaagcatcgctatctcatagacgagccacatatgagttagcctgcgttacgtatctcacccacctataggggttgtatgtcttggatttctttgctatctgaagatatctaacctgcaactttgaagtattgtacatcggcatagagaaattcatgtttactggtccagctt

SEQ ID NO: 39204 - DNA, 420 bp, Oryza sativa
  Clone ID: uC-osroM202011e07a1
agcaaatgcaatggatcaaaatatcacaaatttaaggatctcagtatttttccaaaagggatgcaatccagtctcaccgactggtgatcaaaatactggtgttttccagcagttaaagcaaaagctgtgaaagacttttcctgctaaacctaagatatggaacccataaaccataagaacaaaatataacaagataattgtctcgtggattgcactctgtaaaaccagagcgacccagatgtctaaatatttttatttaactgtagaatgaattgtccgattgtcttatgttacgaccggttcacttcttttaagaggttgcttccttcaggtaggaaataagatcagcacgcttctgtggcttttttaacccagggaagaccattttggttccagggatgtacttcttaggattaagca

SEQ ID NO: 39205 - DNA, 347 bp, Oryza sativa
  Clone ID: uC-osroM202011e08a1
aacaatgaacttatcaattgaattctcctaaaccccaaatataaaaaaggagatttgaggaagtaatcctcggtggtaaaaaaaaagttggaaaagatatgaacaagaagatgaaagttctaagttttttttcttcttccctaattatgattttctgggatgggcaatgatgcctccgcaccagacactcacgagatggacggccgagatgagacgacgacagctcaacagaggatggcctccacgccccctgtccggacccaatggccgacggggcacgccatggccacgtccacgttggccgcggggaaacaatcgccgcaaaggctgaggtgcctgcaggggag

SEQ ID NO: 39206 - DNA, 447 bp, Oryza sativa
  Clone ID: uC-osroM202011e08b1
ttggcggtacaggcccagtacccttccagggggctcttttacgatagaggtgaggcggagaggacgaaggagatggacctgcccaggccgcagatgttcgccggagtctcgccggaggtgtactttcccagcggaggagcgagtgggattaatcggaggaataagcgctcgagggaggccattgccatggcgccgccgccggccaaggaggagttggtcaatctgttcacgctccagccgcagcagtctacgtcgtttgtcaacatggcgcagctccacaacagggtatcggcgtcgccgtcccgcgcgccggcggcactcgtgtccactggccttcgcctggcattggatgagcagcagcagcagcagcagcaacaacaagagagcaaacgcctgaaagccttgtgctactcgtcgtcgcccatgctgttcgtctcgttctccgac

SEQ ID NO: 39207 - DNA, 488 bp, Oryza sativa
  Clone ID: uC-osroM202011e09a1
gatataatggcaatgttcttattagctagtcccaacactaaaccattggcaaacaatgcaacatttttcccatgctaagtttcttattttttgtcacaagtactgcaccttaaaattacagctgcagcaatccactagatcatcatattaaccataacccacaaaggattttcaagtccacatgagtcaatcaagcagctccacttttatttcttactggttgcaacattggaactgcccactgacaccccttcaggtggatcacttggatttggctggggctgggagcaactgatagcaagcaatgagtgagctagcaaatccaaacgcccctgtcacacgcggagtcactttcttgggagccagttgaagcagccctatagcaacaactatgtcgaggctcgatttgatgagagcgagacgcctctcgttgcacttctgcagtttcatctggtattgctcgttctttaacagctcctggtgttaag

SEQ ID NO: 39208 - DNA, 424 bp, Oryza sativa
  Clone ID: uC-osroM202011e12a1
ttgttttttagtcaaatcgagcagcaagggcaaatgtgctgttataaactccgtcgagcagaattcagaattgttgctacctctacgggtccatcccggaggcttgaccgacttcactaaagtacactatatctaatccatcatatgtgtgaccaggctgtagcgtcgcccctgtgaccaaacaacatcttatcagctgtaggtgaggagaaacctaggtaggtgatagtagatatgtggtgtgtacaactccttgtctccttgttacttgtacatgtactgctaatgttccatgttgtacaagcagcacaaacaaaatacatggggcaacacttgttcactcggaaaatgttcctgtgtggatctgtaatacaatgggtacgttcatctcagcacaaactatctttctttttacctacaaaat

SEQ ID NO: 39209 - DNA, 543 bp, Oryza sativa
  Clone ID: uC-osroM202011e12b1
gcagcagcagcggctgtagcaaccaagcctacctccaccaaaatcttcgccccctttatacctctcctgtgggacccgccggtgacccgagcccccccaccgcctcacgccgtcgacgccgccgccgcggggagttccattccaccgggtcgccttccggccgtctcctgcagagaggttcatgaggggctcgaggatgaatccaggtgaccgtagaacgcggagcacgatgtccatcgtaattgtgatgagtttgtgctgcttcttttatatactaggagcttggcagaaaagtgggaccggaaggggggatagtattgcattgagggtgacaaaagagaccgactgtacaatcttgccaaacttgcactttgagacccatcatagcttaggtggcgttaatcctttggtcatgaccgaataagtctttgagccatgccatattcgatacagagactatacctcttgtcaggatcagaaccgagcaatgtactttcctagagaaaatatgaactaccgagagaggcattgttctacagagac

SEQ ID NO: 39210 - DNA, 302 bp, Oryza sativa
  Clone ID: uC-osroM202011f01a1
tttttggtatccaatacacggcgttatgggaaaagcctaatacctgaccagcatgcttcggagaaattaagagggcaaagcagaggacgaagacgacgtcgaaaggaacaacatcgagtcacgctctgggtcgagctacgggcgatcgaaccacaagtagcgtaccatggcctgccgcggatgacagactgctgctgaatgcgcaaaggcttgcagggcccgctggccgccaggagcagctcgacgccgtaaacatggccgtcgtagtcgtgcctgaagcccattccgcaagggcacatgct

SEQ ID NO: 39211 - DNA, 241 bp, Oryza sativa
  Clone ID: uC-osroM202011f02a1
gccaaaggaaccaatatttggaagacatcccccgctaacaaacccaaactgggtacgcccacgaaacccccccttttaccccaagccaaattaaggggcccttttttttaagcccccaaagtgggggcttcccccctttgggtagcacccccatttaagccccccaaaaatgatccgggccccaacaacctccggagccaggccccccgcaaagggctccccagggcccccaaagttgggc

SEQ ID NO: 39212 - DNA, 373 bp, Oryza sativa
  Clone ID: uC-osroM202011f03a1
agcacaagaactattttattattcagtgcatattgaaacaatattgtacatatgaaagatacgttacctgaacaaaattatatattccagggctaaggctgtaaaggcctaaggctaatagaagagtatttgatccaaacgtttgcacaattgaagagacacctatgaacagaagaacagagatgcgcacacagttatacatgctgtggtcaaaactgcactttggattcgcaaactcaccaccgcggggatagtcaatcatggccacaccgtgaccactgacactacatgccgatccttgccctcgtcaaagggcaggaagacatactagttggcgaaatttttgaagatctcccccgtgagctccccgtga

SEQ ID NO: 39213 - DNA, 275 bp, Oryza sativa
  Clone ID: uC-osroM202011f03b1
tatggactagtcgccgccgccgtatatcccgccggcaagctaaatacccctcccgccgtggcagcccgatccgtcgccggacgacctccactgaccagacctactagtcggcgcaggacgacgacaccacgactactaataatcgaccactatcgtcacttactagagatctcgaccattcttctccttccgctctccctactactactatccataccggctcccttcactactgtaaagtaaacactgcgtgaaactccggtgtaatacaacac

SEQ ID NO: 39214 - DNA, 368 bp, Oryza sativa
  Clone ID: uC-osroM202011f04a1
ggatatgtaaatttatgatacagatacaccattggggtccaaatgttcagagatacatcatccagggaattcaggcaatggaaaagaatcaatcggtgtgtggagctaaatgcagaggcctgatcatgccacattagcaagcacaccaggccctgccctaagatcatatctgagtaatgatgaacatgtccatgcaagtcactagctttgcatcctctatctataccttcctcttattctgtatatattcccattgggtgtcccttttttcccctctttttgccacctacatttggtggtggtctaagaatgaatcttaagaatcttccctgaatggaagatgatggcagggaccattacaagggtat

SEQ ID NO: 39215 - DNA, 460 bp, Oryza sativa
  Clone ID: uC-osroM202011f06a1
gcacataaactgcagatgaaaaccatctggtcactttatacaagccgtacatcagctaaaagaagttcacgatgcctcagggctcaggcagacagaaactgaaaacgacgcagcaagttaaaaacaaattacaaaacctacatgagacaaaattaaatcgtagagatagtgtcccactaccaccaaagcaacattatttgcagaggttcctttttttcagcccacatgatcccgtggtctagttattattcgaaaatctccgtccgtccttaaattcgatcgaattttaaatctctctctcctagaagagcttgaatagaattcctccgtgcgtggcgaagaatggcgcgaacaccagcgactcgacggccatgagcttgatgaggatgttcagcgacgggcccgacgggtccttgagcgggtcgccaatggtgtcgccgatcaccggcgccttggggca

SEQ ID NO: 39216 - DNA, 404 bp, Oryza sativa
  Clone ID: uC-osroM202011f07a1
gaaacaaaccaaaacaagaacaggcagtgtaggtttgaaagaggtaaaattcgacactactgttcttgacctttattcagattttacagcgttcacaaatgtatacaacagttaaatgccaagacttggcatacaggacggagcttttattcatgctgtcctccaccaccggacacgattccaacgaggtgattcggatacgttagatatcctctcgcacggcacagccttctagccagccaagattgaccagagaattttccaaggagtctatttggtctgcatcatgctgcattagccggccaataatcggtgcatggggacctgatttttatttgcttcctgtagtagcaatctgagaagaaattgcagtgagctgtagctttatccttttggaaaatgat

SEQ ID NO: 39217 - DNA, 344 bp, Oryza sativa
  Clone ID: uC-osroM202011f09a1
tgggtttttcgccagcgcggcctcccccacatttcattctcctgtttttattttttttcccatgccccacttttttaaacactagccaaaaaacggcctttaaaaaaaaaaggcgggtttttaaaagatttcatttattttaaaattaaagaagattcgcaaacctggtaaaaaggggtgttttattcccaaaaaggttcgaaccgtttttactttaggggggggtccccaattattaaactccccctttaggggcccaaaattattattattaaccccaacctttccttatcgattattattataaacaattattattatttttattaacacccttattacta

SEQ ID NO: 39218 - DNA, 494 bp, Oryza sativa
  Clone ID: uC-osroM202011f10a1
gcaaaatccccaaattgttccatacttccatatgcataacaggcatacattttcaccacaccagggcagcaccgcagcagcacggcactgaactaaccaacagatatcacatgataaactggattcagattggacatgatctgaagcaataacccaaatggggcatgaattgcaattgacatatctatcacacgcacacacccaaaaaaaaacagcagaacaaaaaactcgcccacgtttacagcgtatgcaaagaacagaaaacagcaacttgatcagttctaattgtcgacaattgtgatcatatccacaatcaggacggtcaactttttggcatgacaacgaatggtggatggcgcacaaaaactgcgcattaggttttcacagttgctccattcagtgccatttatctccgagttcttgagcagaatgtgtgcagatacatcatttgacaaacaattgatatatatatatatatatatatatatatatat

SEQ ID NO: 39219 - DNA, 435 bp, Oryza sativa
  Clone ID: uC-osroM202011f11a1
gattaattcagtgcttccttcccgttacattacactgcattacattaaattacattacattacatggttgggaaaaaataattaaggaggaagaagaaattaaaggggggcatgcattgatgcagatcactttcagagggtttggccggctataaatatatatgcttagctaggctaacactcaagcctctctttgagaggcagcttagctgcttgctgctgctgcctgcattcttcttcagctagctagccgctgctgacctcttcctggtcggagctgcttgtgacgcagctggattgcgacgacgacgacgatggcgacggcgaccggccgagctcggcgacggccggcatcgttcgcctcacgtcgttgtcaggcctcctcggcgaccggctgccgctgctgctcctctgaaatatccggcacactaccca

SEQ ID NO: 39220 - DNA, 400 bp, Oryza sativa
  Clone ID: uC-osroM202011f11b1
tttctcctctctctctctctagctctagctctggctcgtttccgccatgaacgtgccaagcaaatgcatggctcctgcaaagtaaaaaaagaagaagaagcagcagctgcagcttctcttcagtatcgatctttaactgtatcgagctagcttagctctctgccattaacttgtgcttcactgagcttgagctagctagcttcttggctgtgtgactgagtagctctagctcctcgtcgtcgtcgtcgtcgtcgtcggcgtcggtggtggtgtgaattgatagaattgatactatggagagggcggctgcggcggcgcctgtggtggtgaggcatggaggagtggtgttgccgcccgggttcaagttccacccgacggacgaggagctcgtggtgcagta

SEQ ID NO: 39221 - DNA, 286 bp, Oryza sativa
  Clone ID: uC-osroM202011f12a1
ttgttttttttttttttttggttttttttttttttttttttttaatcgggacttaaaaagcaccgcccaggtatttcatttatcccaagtcagctcaagatttttgggtaaaccaaaagggggaaagttcgacccccacaaaaataaatcaattatgctgcaggggaccaaaaaaatggttttttttaaagctttacttgatgggtaacttacagtaaccatgggaaagtaaccctaacaagatgaacaacgggacagaaaaaccttgcatgggtgagcttttcaa

SEQ ID NO: 39222 - DNA, 414 bp, Oryza sativa
  Clone ID: uC-osroM202011g01a1
tttttgttcgatataaacggtgcttctgcatttgcctttgcattgtacaacatgtaacagcttttatgtttgtacaaaccaatgttcctagacagtatggagaggtacaacaacgagttacagtcaaggtgtggctacccgttaattcataaaaagcaatggtacagggcagctgacataaattaaggtgtgtatcatgcccaaatcaacttcgcgctttactgaagcgaaagaacaacggggcaccagaagcacatccatctcactgttgacgaaatcagattcaccaaatcaggtggaacattgcgcttttatgggaaccagcgagaggaaacatgcatctagcaagaaaaactagggctacttgaacagtcagtctttaaataaagtggagagcaccaggccttgcacaaa

SEQ ID NO: 39223 - DNA, 337 bp, Oryza sativa
  Clone ID: uC-osroM202011g01b1
cttttcctcctctttcccttcctccgccgctcgagcgaaaaaatctccacaaggcgtgaagcagagggagggtgagggattagaaacaaacaacccttcggagaaaatcacgagaggcttcccgagggcaaagtctccgattcattcaggtccgactcgatcggcgatccgacgaagctcgagcaggtgagggagacggactcggactcggagcacggaaccggtatattagggaggctgaagagggagcttgagagggggtctagccttaagctcgaacgcggggtggtggttgtaccagcagcagcaaggaatcatggactcggagcactggatc

SEQ ID NO: 39224 - DNA, 69 bp, Oryza sativa; identical to SEQ ID NO: 17936
  Clone ID: uC-osroM202011g02a1

SEQ ID NO: 39225 - DNA, 420 bp, Oryza sativa
  Clone ID: uC-osroM202011g02b1
ttttcagctgatcaagagctcttaattagctgggtagtgtttagctgcgcttgggatcgatcgatctcgggtacgtagcaatggcgtccaaggcgttcgctctgttcctggccgtgaacctcgtcgtgctcggggtggcaagcgcctgcggcggcagcccgtcgtgcccgacgccgacgccggcgaccccgacaccgtcaacgccgacgccgacgccgtcggcgttcgggaggtgcccccgcgacgcgctgaagctgggcgtgtgcgccaacgtgctgggcctgatcaaggccaaggtgggcgtgcctccggcggagccgtgctgcccgctgctggaggggctcgtcgacctccaggcggcggtgtgcctctgcacggccatcaggggcaacattcttggattaacctcaaacttcccat

SEQ ID NO: 39226 - DNA, 323 bp, Oryza sativa
  Clone ID: uC-osroM202011g03a1
ttttgtttttaactgtattttttctccatggtttttatttaatttgattccgatagataggatcaagcagttcaaacaccaaaacgaaagcgaactgaatgcatggttacataacctacgaagaacacctaacactgggtggatggatagagggctctgcgactggggagagcccctggagacgatatcgactagagttgatgataagaggattatgacacggctagctaaggataactggccaagatgggccccaccagtcaattcctttcagttgccgccggagtcgccgtcgtaacggacgtcggggctgccaatgcagg

SEQ ID NO: 39227 - DNA, 224 bp, Oryza sativa
  Clone ID: uC-osroM202011g03b1
ttttggctcctcctccccctctttaccttttggggctcttttaggatccgtggggggtctagggtttagtgggttgagatggcggcgccggatgtcgagtaccgttgcttcgtcggcggcctcgtctgggcctctgacgaccgttccctcgaggccgacttcttcacttacggcgagatccttgactccaagatcatcaactacagggagacggggaggtcacg

SEQ ID NO: 39228 - DNA, 378 bp, Oryza sativa
  Clone ID: uC-osroM202011g04a1
tttggtttttttattttttttttttttttttttttttttttttttttttttgagggccaaccaaatttagatatacagatacgatttcaaacgggtgagatcacgatacaaatgctaaacctttggagcttaaaatccgctaaaaagccttcaaaaaattggcatcatgaaacagcaaatagcccgaaataaaaagaaaaggtaaaactcctgaaaaccggttaaatttctgacggggtaaccaagggactaggtgaaataaaaccctccacggggacaactattagtttcgcagcataggcaagaaaccctgggtgcttttagaagctgctgggggacatgaagacggggacctttttgcccatggaggggggccgg

SEQ ID NO: 39229 - DNA, 236 bp, Oryza sativa
  Clone ID: uC-osroM202011g05a1
actcgtactactggtatgactatgttctttaattccgtggcccagtgccagagaaccggtaaaggagccgcacaccagaacgggcgcagacttccacttcctgctcgagcaagctcgggctcagccacgccaggagaagggcctctactcccaggattcgtcattcaattatatgcaggcataaaacctataagcttgaaagctaaaggaagaagagactaaagtcctggacggga

SEQ ID NO: 39230 - DNA, 587 bp, Oryza sativa
  unsure (1)..(587): unsure at all n locations
  Clone ID: uC-osroM202011g05b1
gttttagaccgcgagcgggccgccttttgctgggtactcttcctcttcagcggcgatgaagggacggtatggccagcgcgtgaggctgtacgtccgcggcaccatcctcggctacaagaggtcgaagtcgaaccagtacgagaacacgtcgctgctgcagatcgagggggtgaacaccaaggaggaggttgggtggtacgccgggaagcgcatcgcctacgtctacaaggccaagacgaagagcaacgactccaccatccgctgcatctggggcaaggtcacccgcccgcacggcaactccggtgtcgtccgcgccaagttccggttcaaccttccgcccaccttcatgggcaagaaggtccgcgtcttcatgtaccccagcagcatcttaaagcatccaagggttctttgcctatgctgcgaaactgatagttgtcaccgtggagggttttatatcagctagtcacttggttaaccagcagaaaattaagccgctntgaggagttttagcttttcttttatttcggactattgctgttcatgatgacaattattgagcttttagcgatttgagctcaaggttagca

SEQ ID NO: 39231 - DNA, 174 bp, Oryza sativa
  Clone ID: uC-osroM202011g06a1
ttttgttttttttatttgattggtattgaaaaaatcttaaacttcaaattctggttacaacaaaaagtatagagaaactacaggtctacaaccgtggccttcctgaacaagaagcaagaaccacgcgctccagtacacactgcgcacgctaggtgttcgcacactccgggagag

SEQ ID NO: 39232 - DNA, 449 bp, Oryza sativa
  Clone ID: uC-osroM202011g06b1
ttcatttctccccacctcctctcctcctcctcgttacatttgaagccacgcgcggacgggagagaggggaaggacgcggccgcggctcgcctctcccccccctccttgcttgccgccgatcggcgatcggtgcggcgggacgatccccggagggagcagccggcgcggagtccggaagcagatttgtagcgtcatccaattggcttccgctatctgcaacagtttccaccatttgtcaataaattactgaccttgtacttgaggatcgtcaacctcaagttgtaaaacattgatttttaatgggtgatgctttattacattgaacttatttaagtacctcataagatatccaaggaagacagtaaagtttcgatgcatcaacataggatcactatgctatcttccttagaacatgtcaccttggtctagttcgacaaccaagccatgga

SEQ ID NO: 39233 - DNA, 346 bp, Oryza sativa
  Clone ID: uC-osroM202011g07a1
gatatataaaggaattgatgatgtggttccaaatcaatcaaaaattgttatatgccttgttttcaaatgatggggtgcgagtgcaacaacacatgtatccaacggaaaaccaagcttacatgtactatcatcatagaattaatcaaattccgttgagctttccatggcgtgaaagccaaaaacaaaaaggtcaaaaaaggggtgaccctcttcatcagatttagccatttgcaacgatttcatggatcttggcactgatctcaggatcatctgatccgactgtttactttatgggcacttccttcgggccgctaagtccgaatgacagccttactaaaactttcac

SEQ ID NO: 39234 - DNA, 269 bp, Oryza sativa
  Clone ID: uC-osroM202011g08a1
ctcggaataaaagcatgacaaaatcagaggtttaaactataattaaagcggactactaccttaattgtcaaccattttacaaaatacctgcaaatgcattatcatctacagtatgatccctagtacacagcacagattaaaatccagcgagagttggctgcagaaatgcacatgcagacagaggcgagaaagcagagtctactctaaaattcagcagcagctcttgctccgggcgcaagcccttgccgccggcggatggccccgggggc

SEQ ID NO: 39235 - DNA, 457 bp, Oryza sativa
  Clone ID: uC-osroM202011g08b1
ttatttatctgaagagttgttcagaggcttgggtagctttagttgatttcctgctgctccattggttcttgctcttgttcttgttgctgctgctgctgctgcttttgctcttggtgtgtgttcatgtgaggagaaggattggaagaagggaagtgaagccgagattgggaagagcaggtttggtcaagaaggaagaacagagtgggagtttcaggagaagctgagagacaccaggacaacactgaaacaccaatgtgatcaagctgctgccatcagatttcccaactcaaataatccatagcaatgagaaggcacatccttgtgatctgcctccctctaatcacactcctttcactctccatcagcttaagctgccaatctgacccccaaattcagacccaagcacttctccagtttaaggccggcttgaccgaccctctcaacaatttcagacatg

SEQ ID NO: 39236 - DNA, 408 bp, Oryza sativa
  Clone ID: uC-osroM202011g09a1
atcaaaacaaattaccatgttacaactattatacagactaaatcagtatatggacgtctatatcatttgataattacaatttccaacatcagagggaagcttaatgaacacacaaattacaagatgacaccaaaccaacatacaagagggccaatcatatgttgaaatgaacccatatcctagctagttatggaacagtacaagcccatatgtaaaggatactactggagatgcaagctggaccaagtagaaatcaaatactgctactgagaactcctccatggttcataaagcaattgtttctacttagaagaaactttaaacagatggctttataatgttgagggccataaatggtcttgaaataaatcttcaaattaattttacccaaagtagtcaaaagatttt

SEQ ID NO: 39237 - DNA, 295 bp, Oryza sativa
  Clone ID: uC-osroM202011g10a1
tttgtttttttaaaacaaaatcaatcttgaatttaagcttccaatagtaaggaatccttcacatttcaaatcagcttaaatgtggcttgcacttcttaggttagctaattttagcttctgttggataactttgggtcaacttaagaatgggaattttcttttgttcattcagttgctatggcagaactttctgaaattgcagccagttacaaagtatctaagctatgttctctggagaacttcgtgagttctttgaacatcagtcatatcattattctacaattttctgaatgag

SEQ ID NO: 39238 - DNA, 425 bp, Oryza sativa
  Clone ID: uC-osroM202011g11a1
aaaatagcagcaatgcatttatcatattatatatgtagctacaaactacatatagcaagctataagtatgtacagcaatgatggcaggtaatattgccatatcaattttcctgctatggtatgtacaccagagaacgagaacaatttagatgatttgggatgggggagcatctgaaataatgcacagttcttcagacttcacctacggttcaagcactactgcccccaatcgatcatcaaactacaggggcaagagaaaaagataccttgggtatattgcaggagctgagaatatttgctaagttttcttcacctatgatttaagcactaaaacccctatggggggaactccaggggttggagggaatgctggtgcaagcctgcgcagcaacctttgccatcgcttcagcagagatgccagcatt

SEQ ID NO: 39239 - DNA, 499 bp, Oryza sativa
  Clone ID: uC-osroM202011g11b1
tttccaaatggcatcaatgtttatgccaccacggcatcaaacgctgatgagagcagctggggaacatactgccctggggagtacccgagcccacctccggagtacgacacatgcctaggggacttgtacagcgttgcttggatggaagacagcgatgtccacaacctgagaactgaatcactcaagcagcagtacaatctcgtcaaggaaaggacatctgtgcagcacacatattactctgggtcacatgtgatggaatacggttctttagagctgaatgcccatcatgtgttcatgtacatgggttccaatccggctaacgacaatgctacatttgtggaagataactcgttgccatcgttctcaagggctgttaatcagcgggatgctgacctggtttacttctggcagaagtaccgcaaattgcctgagagttctcctgagaaaaaccaagctcggaagcaattgctttgaatgatggcacacagatctcatgttg

SEQ ID NO: 39240 - DNA, 288 bp, Oryza sativa
  Clone ID: uC-osroM202011h01a1
tttgggtttattcccgaatcaagaaggttcagcattattattcaataaatcaactagggaatgacaatcaaattatcgggtctgacgactactactcctaaatgcctcttttttccctatgttcttctctgcttcagtacatccagtcatccgggggccagatgccaaccacaaacactacaaatgtatatacaagtaatgaattcttcactacaagaagtatgtcagttgctcccgcttcctcgacccgcctttgccgtagagcttattccattccttgatctgatt

SEQ ID NO: 39241 - DNA, 301 bp, Oryza sativa
  Clone ID: uC-osroM202011h01b1
ttttctggtcgttccagacaatgagtatgaaggggagatttgaacaacggttaggccagccaatgaaataggagtgacatttgatgacattggagcactggctgatatcaaagaatgccttcacgagcttgtcatgcttcctcttcaacgacctgatttcttcaaaggtggtctcttgaagccatgcaagggcgttctgctgtttgggccacctggtacggggaaaacaatgctcgccaaggccctagcaaacgcagcaggagctagcttcttgaacatctctatggctagtatgacattc

SEQ ID NO: 39242 - DNA, 458 bp, Oryza sativa
  Clone ID: uC-osroM202011h02a1
tttttggtggtcacacgaacaggccagaatacacatttcgctgacaggacactacgcaagttagagttgtacccaggtgcatagctgcattatgcagtcccatctgctgtacattatttgtacaaatatattccagctatcacaaggctaggcacaaaattagagacaaactaaccaggccctacttgatacaatgccgtcgatcaatttacagtagctcatatacttctctgataccgagatttcagagaagcctgacctttctcttcattaggagcatttggcaccggaccaacaaaatcagcatccccactgcttggccagactagaggaatcagcttctgctgatatgcattcgtattatcgcatatgccaagctggatgacaaacgttactgtgcagcctcttcctgttccttcgctatccaaccagatgtgccctcccatcaaagtaacaaa

SEQ ID NO: 39243 - DNA, 404 bp, Oryza sativa
  Clone ID: uC-osroM202011h02b1
aagctggcacgcgtgcggtcccggcccgaattcccggggtgagccacagccgtccgtactattacagttgactcttgtgctgcaaagggtgactatttaagagaatggagatgcccacattttcacccaactgcaagcgatgacaatttttatttgaaagttcagattaaagatacgggctgtggcattagccctcaggatctacctcaagtatttacaaagtttgctcaatctaagcctggaggaaacagaggatacagtggtagaggtcttggccttgccatttgcaagacgtttgttactctgatgggagggcacatctggttggatagcgaacgaacaggaagaggctgcacagtaacgtttggcatccagcttggcatatgcgataatacgaatgcata

SEQ ID NO: 39244 - DNA, 395 bp, Oryza sativa
  Clone ID: uC-osroM202011h03a1
ggagaccaatcgagtattcacaacacattacgattcatttgccctttgattgacgtacgtgcggccacaggcacaacaatcggagatttcatctcccaagatacaaatttggccctttggaaattaagttaacaaacaggggttataaccctgcgcacctgacaaattaaaagaaaatcaaggcaaaatctttggtttttgtaaaacaaatccagaactgacgacaaaccgacgtacgaacaatgagtacaacagtttgtccaattgggacgcacgaatgcatgtaaaatgtgtgagatcgatcgatggatcgctcactagagcagcatgaggacccccgcgaggaggaagagaagcgagcctgccagcgaggatgccagcctggacgcggcagc

SEQ ID NO: 39245 - DNA, 301 bp, Oryza sativa
  Clone ID: uC-osroM202011h04a1
ttttgtttttttttttttttttttttttttttttttttttttttttttttttttttttttttttttttttttttttttttttttttattgttttttttttttttttttagggaaaaaaaactgggggaaaaccaccccgcccaaaccgtataaaaccctggactttttaaaccggggtaggaccccccgaaacttgggggggcggcttaaaacaaattgaaaaatgaccccggggaggtttacaaacagagggtactttacgagggggtatctggaaaaaaaaaacctttaaaaggggggg

SEQ ID NO: 39246 - DNA, 402 bp, Oryza sativa
  Clone ID: uC-osroM202011h05a1
aacctcccgtcggactgggaccgctacgacggcgaggacgatgccgatgaatccgcggccccctcggagtggaccggcgaggtggcgccgcgcagcaagggcgcagacttcggcttcctgctcgagcaggctcgggctcagccccgcgaggcgcagcgtctctcctcccaggattcgccattcgattttatgcaggcttcaacctctatgcttgaagctaaaggggaagagattttgtcctggtgtgaagatgacaacttcatcttagaagatgatttagcacccgatttcgaggtaccttttctctccatggatctgcatgcattggccacccatctttcgaagcttaagctttctgagaggcttttcttagagaaagatctgctacctgaggatctggct

SEQ ID NO: 39247 - DNA, 438 bp, Oryza sativa
  Clone ID: uC-osroM202011h05b1
aatcagttcaagaaggcacatgtagatgtaggggagctttaggttttacagcagtaagcttcctgcattccagtcattaagcaacagtgtgacaccatagcaaagtctttgccttgaactaacacgtgcagagtggaaaaagtggaagccatggggtgatgggggccaggcttttagactatcactgtatcaactcttgttccccagtgaacctccatactgattggtatgtgagcttcaaaagacagcttcctgaaagctataaactagatcttgaagtcaacataagtgcaatgggcttctgcgctgcagtaaaggatccaactgaaacttcatcatggcaattgtctctagagagaatcaaaccatgaatcaaaatcgtccgacgcatttgagggtccggaattaggaggaacactgacacttgagatagttgct

SEQ ID NO: 39248 - DNA, 436 bp, Oryza sativa
  Clone ID: uC-osroM202011h06a1
ttgtttttttagggtacaacggaattgtgagattgcttgagcgaaatttaatgaacatttttttcaacacagggacatgatccacacagattaggggaagaaagaagaatcaccatgcacctatacacaacaaacactggctgacaaagttcacaaatttatgtatgtaaagaaaaaggggaaaaaataagaccccaataaataaaaaaaatagataaaaagtgacagaatatactactactgaactccaaaatctaaccctacatacgtcgctccatctcactcgcttattcatctacaagtgccttcgattcgatatcctcttaaaacccaagagaaaaattcaatggattgattaccttaatacttaggagctagcattatcaggatacacaaccttttcattggtcttcccaaataagcttgctcgagctct

SEQ ID NO: 39249 - DNA, 251 bp, Oryza sativa
  Clone ID: uC-osroM202011h07a1
ttggtttttttattttttgggggcatttaaaacatattatttatcaaattattgtcacgagttaaactcttgatcatatatataaattaaataggttaataactaaattcaaagtaataatgtagaacgagtaggatgcaaagtaggagtacatcaatccatcaaaagttatatagtttatcatataggcgcgtacagatgagacaaatattttggctcttaagtgtaaacagctatagggcagtcgacat

SEQ ID NO: 39250 - DNA, 277 bp, Oryza sativa
  Clone ID: uC-osroM202011h08a1
ataatccactagaagaattcgatcagttttctcttctcaataaaacaagaacaacaagaattcagtttcacccacagctacttaaagactacagagacagtggtagtaaaactgacatccttgtgggtttcacagggaaacgatgacttgtacaagccaaacagaaacagaagtgaagtgaagtgaagagaaaatttgcataaatgagaattcagacctcggccttgtgctcggggcgatgggtgaactcgaagtcgacgtgcacaaaggcgcgctt

SEQ ID NO: 39251 - DNA, 408 bp, Oryza sativa
  Clone ID: uC-osroM202011h09a1
ttgttttttcaaaattcataaatctcaacagtttgatcatccgcagcaccagcagctcagagtagcaaagcatttaaactgggtactcaaaatatctgccacaaaactcaggacaagtacagaaactgggaaagctatcaggtgaggttcgattgaattctgatggcctaggccttgagcttgccgaagaacctctgcttctcgtcggtggtctggaagcgaccgtgcccgaacttggacgaggtgtcgatgaacttgagcttgatctcctccagggcgagccgcgaggtctgcttaagcagcgactggcggagggtgacgacttttttcttcggaccgacgcagcaacccttgatcatgaggtagtcgccctttaccacaccgtaatgcgggaagccgcccatcggg

SEQ ID NO: 39252 - DNA, 413 bp, Oryza sativa
  Clone ID: uC-osroM202011h10a1
ttgtttttttttgaagtggtaatttaaatacttaatagtaatagactctttgatggagtattacaacatgcagcagtggcattaatacgccagtacattaattaagttacacatatgcaggctccattttggtttcttttaatttatcgtattacagaatttctgtagccttgctgatgatcacttggatatcatgtactagtaattaacaataggatgcatacaaaagatggcccaacgacaacagaagatgcgtgcatctgacattgtctggccttatttggttggtagtactccaattaattaacaagagatgatgcattcttgtgccttagtttcttcacatgcttggcttcacgttgagcctattcgcaatcttcacccccaacgactcatcacactgggagaggtag

SEQ ID NO: 39253 - DNA, 341 bp, Oryza sativa
  Clone ID: uC-osroM202011h11a1
gccagccgcgggccgtcatgggaccgctcccgcggcagggcctccgcccccggatcccccatggatggggtcgtggagccgccccggaaggaggtgcttgctttgccgcctccaccgagccctggtaccccggcgcctccgcctccggccgccgaggcacagtcgcctgttactccggcacctgtgtcgactggtatggagcaggagatgaacggaggaggggaggtagatcgggaggagtggatcactgtattcgggttctcccttaaagataccaaccttgttatccgggaatttgagaaatgcggagtaattttgcggcatcactctggtccacgagt

SEQ ID NO: 39254 - DNA, 270 bp, Oryza sativa
  Clone ID: uC-osroM202011h12a1
ttgttttagaatattaatgaacagtttaagtgacaactgatgtcactgacgaagtgaggatgaactttcatcagtgtatagacagacactcattcaaggtgaattgatactttggtacagctatgtcttatggtgcttccaatgctggagtagtttcatccatgcaaaggctatttctacatcagcagcaccaagaatagtcaccctcaaggtacaaactacatctcaccacactggtttatgacacatgcgagcttcggacggctgttt

SEQ ID NO: 39255 - DNA, 156 bp, Oryza sativa
  unsure (1)..(156): unsure at all n locations
  Clone ID: uC-osroM202012a02a1
tctgcntcgcacgactgcggcacggcagcgtgttgtttttcaaaagcgggggggtaccaagcaatgctggtgtgccgcgtcatcgccggccgtgtccgccggaacgactactatggctgtgcggaggaggaggagggagcgttcgactcggtggcc

SEQ ID NO: 39256 - DNA, 209 bp, Oryza sativa
  Clone ID: uC-osroM202012a07a1
agggcagacaaatatgtgtggggggattttaagaatgaaaaatgagtaaaaacagttggtgcattgtagggtagaagatacaattaagaaaacaggtaaaatgaaaaatggatgtgatacaaagaactatataaacttacaatcagtatatgaacaaagaatatctacgcacaatcaatatctgtctatagtttaagctctacacatgc

SEQ ID NO: 39257 - DNA, 105 bp, Oryza sativa
  Clone ID: uC-osroM202012a08a1
accttttcctgcttgtctactttctttccatgtggtgtatctcctaatagctgaactaaagcaggggcctagctacatcctcactactaatatgatccgctcaca

SEQ ID NO: 39258 - DNA, 339 bp, Oryza sativa
  unsure (1)..(339): unsure at all n locations
  Clone ID: uC-osroM202012a09a1
tttttcacccttttttttttttttttttttgtggtttttttaaatttttgggggtttataattttngaaacacatgatttaccataacaataaaaaacaaaaaaaaaggcaaaaaaaaaaaaagaaatgcccacaaacaatttaaaaaggctccccaaccccaaaaaaggcctggttcaaaaaaccccaacctgttttgtaaaaaaaagctaaaaggcaaaatttaaaaacatttgttagaaacctaaaaaacggggaaccccaaaatttccgaaaaaaaataaaagcaaaaaagggtcaattaaaaattacaaaacccttagttaaaaattttaaggg

SEQ ID NO: 39259 - DNA, 385 bp, Oryza sativa
  Clone ID: uC-osroM202012b04a1
tgtctttcctttttttttttttttttttttggtggtttttttatggaaggggcaatagttattgaaaataatcgagttacatatcattctcccttaaagagcatcggcaacagataagaattctactacaatctgaattgctcactatggcagacgcagcaaaccatctagagcacttatttgggcagacagatttaaaagaacaatgaacaagtaacatatgctttgccggtagcccagccagctgcttaaccgaaactgcaagagcagaaccaaataaggcggctcaaaaacttcagatgaatcaaacttgcaacttgggggtgaagaactggccatttcttaaggatttggattttttttttttggcggctttttttctttc

SEQ ID NO: 39260 - DNA, 372 bp, Oryza sativa
  Clone ID: uC-osroM202012b05a1
gggacggagttaaaaatcagtacagggccaaaataacataacataacacaaccacatgcgtctcactcagaattgtcttgacattcttattaccatgtgaggatgcagaaccgaaacggactcacgataagtctccacctctctaggactctaaatgctagcgagtggaatgctaaagtaatattacctccagtaataccagcaccacggcaaaagggggtaatccaatctcatgtaagccatagcagcagaccaaaacttcttacgcgtcacaacaccagattacctcttcaggtgaaggatgaccaccgcaacgacggccgtggcgggcggctccagcggcggcagctgccatcagcccgtgataaccta

SEQ ID NO: 39261 - DNA, 432 bp, Oryza sativa
  Clone ID: uC-osroM202012c04a1
tttcttccttttttttttttttttttttttttaaataaatacgagggaaattaaagtgaatatgcttgcaataaaagttatagatataagtctttgatacaaaggtgaaaactgaaggttacagtattcaaagtggtacacaagaaccacagtagtgttatcctttgggccagtcttcaacaataaatttgtggaaatgaactacaaggatgaaggggcaaatagacaatgaagtgtctacttcagtttcgacttggcagaactttgcagaggcttagtgattgaaacagactgactatttcttactgtcttctttacattgtaagttattgacaagaatgcacaaatcagtgcaattaaaatggtcggataaacatgaactgattgtgttggatcactgttcaccggtttcccaaagagcgcttttttcac

SEQ ID NO: 39262 - DNA, 403 bp, Oryza sativa
  Clone ID: uC-osroM202012c05a1
acggatgggggtttcacaatacaatgccgtgcaccacgtctaaggtttcatcacacacgactcaaaatgtctccatccactgagaagcgtgcacacacaatggtgacgatccaagtcctccgctaccaaaccacgacagatgctagcattacaagttttacaacaagcccaaaagggtttttgctcaactgtggcaaaaagactcgcgcttgaagatgtacaaagatgaatctctgctcgaccgttggtctatgaactttcggtatttgccacggcttgaatttcgaagaaacacgccaagcttcagagctagcccacaagaagatccacttgttctctgtacatctcttttaggtcaacaatgtcatttcttagctctttcaactttcatcacgttccccca

SEQ ID NO: 39263 - DNA, 399 bp, Oryza sativa
  Clone ID: uC-osroM202012c10a1
aggaaaatgacaaaaacgagctctcatattattggggttgcattccgctgtgatacacttttaatcgaattacaaatttgatacacttcactggaaagaattgcaaacaataggcttaaaaaccgtaaagctatccaaactagtatacaacagagtaacctactaaattaaacaagggtgctcaactgtccaaaaagacttgtgcttcaagatgtacaaaaacgaatattttcacactggtatggctatgaactttcggtatttgtcacggcttgaatttcgaagaaacacgccaagcttcagatctggctaacaagaagatccacttgttctctgtacatctcttttaggtcaacaatgtcatttcttagctcttccaactcttcatcacgttccccc

SEQ ID NO: 39264 - DNA, 296 bp, Oryza sativa
  Clone ID: uC-osroM202012d04a1
acaaagtggcatatcagagagactttgtttttacgcactgaatacaattcaagtgatatgaatcaaacattaatttccaaaatatctagcaaacacgaacccgggtgcattatctcaagtacgcgcggagaatgccacaaattaaacaaaatcatatcgaatcaaaccagatacgtacttcttgccaccaaatgcacgcatgcatgaacatgcccatgcatgacaagtgacaacacgctgctagcacgtaagaaccaaatatacccctgttgcgttgagacctgcatggatcgatc

SEQ ID NO: 39265 - DNA, 437 bp, Oryza sativa
  Clone ID: uC-osroM202012d05a1
acggataagggtaacacaatacaatgccatgcagcaagtctaaggtttcatcacacacgactcaaaatgtctccatccactgagaagcgagcacacacaatggtgacgatccaagtcctccgctaccaaaccacgacagatgctagcattacaagttttacaacaagcccaaaagggtttttacttaaactggtccggtctgaccaacaagaagctagagaggatgtagcacagcgtgcgcagtgttcttctgttagtcactgcgggcaggagacccgtcggcagacctggagcgggatcctggaggcgatcctgaggattgcctgggggacctccggtgcggaggggatccatcgctgtcagctggcggcgacctcttttcataaccattatcagcatcacgccggtccccatctttattggcaggagaataggat

SEQ ID NO: 39266 - DNA, 483 bp, Oryza sativa
  Clone ID: uC-osroM202012d06a1
tttcttccttttttttttttttttttagcactaacaataataatcattgatgctgaagaccatgtcatgaaacaatagggcatatggtttattgtactgtgcatattttcacagttttgcacatacagttctctggttatagtagaaggaagataacttacagaaatatagcagaactgcagaagcgcgaagagaaaatactgacaacataaatattgcacaatagaaacatgaagcatggcatcaatgtagatgcaagattctctctctcttttcttggtttatatacacggatgcaacagcacacatgacaacagggctattaccaagcgtctgaatgaaatgggagttgggtggattcctcactttctcaggcctttacctcaactcgtttcacagtcgtgttaggagggtttggtcgttgttgctgctttgattccagcttggatgatccttttgctgcattcttggagctcatggatt

SEQ ID NO: 39267 - DNA, 485 bp, Oryza sativa
  Clone ID: uC-osroM202012d10a1
gaagaatgaaacataatttcattgtcctatggccttcctggaggcttggagcagagatgtcttacatcagaatatcacataacttggtagtacgatgagggggcccatgtgggaaaaagcagccggagggttcttctgaaccagaatgccaaaaagattgcttacaggaaacacatcacataagctgaaggaacaatgcgcaagcgcagcacagaaatacagtgaatatgccatgaaatccatggttatggcgagtgattttgtttgctctcctatttaaaatgcttacagaaaaggttaagagtccggagatggtactggcctgatcaaacgataaacagcatctcctgcagtgattcagtttattgccaccttggaagggcaagtgtggtatcatgggaaatatgattactgaagttcagacgcggacaccatattcagatattttggtgatcctttcttggagaacacatctctggtttttc

SEQ ID NO: 39268 - DNA, 380 bp, Oryza sativa
  Clone ID: uC-osroM202012d11a1
gcgtctcctgcagcgacctccccggctggctcagcctgctggagtgggtctggaagctccacggcgcggctggcggcggcggcatcctcgaggccgtcgaccagaggctcgccggcgagttcgacgaggtcgaggccgagcggctcctgctgctgggcctcgcgtgcagccacccgaaccccggggagcggccgaggacgcaggccatcctgcagatcctgacgggcgccgccccgccgccgcacgtgccgccgtcgaagccggcgttcatgtggcccgcgatgcccgtcgcgctcgatggcgacgacgacgacagcgagacgccgacgtcgcgcagcagcatgctgctgacctcgtcgtcgacggggtggaccaaaatc

SEQ ID NO: 39269 - DNA, 435 bp, Oryza sativa
  Clone ID: uC-osroM202012d12a1
ccaaaaccaaccagttgtaaacttggtttattatactctcacagaagtagacaaactgcataccattctgctgtcccgtaacataattattacgttggtacaagaaaccaatgcttctaaacatagaagcgctacaaacacaaccgcgatctgctacgtgtatcgtatgctgatcgcggattgttatggaactggagatacagattacagaccggctacaataacacttaagatgcccccgtgcccacatcaactctgcaccttacgggaggaaacgacgcctggtgccgcagaagcgtgcctatctgccatggatattaccttcagcaatttgaccgggcacttatctatgcaaatatgcaccaggatttacccatgcatctatcgactacttaggctcatcttgatttattaatctccaaataaagtagtgag

SEQ ID NO: 39270 - DNA, 475 bp, Oryza sativa
  Clone ID: uC-osroM202012e04a1
tgtctcggcggcaggtgcggcggccgggccttgggcggcgccgccgccgctttcttggtcttggcacggatggcgtcgagggcctcgacgtacttctgcacccgcttctcctgcactcggcgctgctccttgacctcgccgtcggcggcgatggagtcgagcttgaccagctcattcatcagcgcctcggtgagcgccaccacgtcggcgtcaaccaccctcccgcccttgctcacgatcgcctccagcgccgacaccttggaggcgagcttgtcgacgtcgagggcgacgcgggagacggacttggcggcgcgctcggccttgcaatggcggcgctcctcgaggaggcgcttggcctgggcggtggggtcctcgaggaggagcatcttggagcggtccttgacgccggcgatgtcgaggaacgccctggagtccctctccttgtccctgtacaccaccttctggtcgtcggggt

SEQ ID NO: 39271 - DNA, 378 bp, Oryza sativa
  Clone ID: uC-osroM202012e06a1
tctttgccgagcaaggtcgcggcgggggacttggtggagccggcgcgctgctcggacgccgccgcatcgccggcttcttggattgacaagaagctgcttgttgaccccaagaatttgtttatcggatccaaaatcggggagggagctcatggcaaggtctacaaggggaagtatggtgaacaaattgtagcaataaaggttcttaacaatggcaccactccggaggaaaaggcaacccttgaagctcgtttcattcgagaagtaaatatgatgtgtaaagtgaaacatgacaatcttgtgaagcttattggagcttgcaaggaaccattaatggttattgtcagcgagttattgcccgggatgtcactgaaaaactac

SEQ ID NO: 39272 - DNA, 368 bp, Oryza sativa
  Clone ID: uC-osroM202012e10a1
gaaaaaaaatgaagtttattcatatgatcatgatgagcacgtacttggagaaaactttgttacatacatgcatggctcgctatataaacaaaacaattaattaatgaagtgattgaaatcaagaaaaaaaagaagggacaggtaaatcttacgataatgatctacatggaaattaattataagatggtcacggccggaatcaaaagctgaaatccataatcacagtctcggcgagcagctgatgatatatgacgataattaagagagatgattagttaaccacgttgcacttcttcctgatctcgccctggctgccggtgagcacttcgacgccgcccatcttgaccatggaggcggcgaagtcggcg

SEQ ID NO: 39273 - DNA, 440 bp, Oryza sativa
  Clone ID: uC-osroM202012e11a1
aggcatatgactggatttcgcttaaatatgaactgactgttagtagtctttatcagatacatcgagtacactcgtgtcggatagcagctatgtaaactgtaccatcgttgctctaataacttttcaatgaaaaaaaatcaagctctaataacttttagtcccccatgataatgttttggggccgtggcaatacaacacttgggtgatttaggctgtatgctatatgaacagttgacaaaaggctaacttgcttaaaatctatacgtatggacgcttgcgccggagttgatggtcactctatgatcctgtacatgtgtgcgatctcaaagcagttcgccaattccatcctacggatgcggcgatatgcaaactggaccaaatttgatgcggtctgcgagcaaatttaattcaacccggaggtcagatcttcccggtggttt

SEQ ID NO: 39274 - DNA, 406 bp, Oryza sativa
  Clone ID: uC-osroM202012e12a1
agctaagccacaggatctgggagaataatgcacgccctaaatctggcttcttattcaactacaagttacaactcgtcagtagaagaatcaggtcaataatgtacacttcacaacaactcttcctatgttacagctgtaatggaacccggaagttgtacaccaaaaaaatagtatgacaacagttaacaccttgatggacttgcatctgaaaattgctcattaagtcgactgcagcagtctaatctcaatgtggcgctgcacctgccaaggaactgacgctgatctttttctcaggcccttccatatggaatgaaaacatgtattcccacaccatttagtgcccacgccccctcaaagctgaaaatagtccgcccagtattttctccttgtgctttccatcatgctc

SEQ ID NO: 39275 - DNA, 582 bp, Oryza sativa
  Clone ID: uC-osroM202012f04a1
tgttcttcctttttttttttttttattttgaatctccagcaacaatcaaatggccaacagtacaccatatcactaacatccaaattttcaaacacacgttactgaaattgatccaaacagttttggctatagacatcggctgtattcagccttgaaacctattccactacgacatatcactgcattgcagctcattccgcatcagattctaccatgtcgtcgttgctgtcctgttcagtaatgccctccctctccaattcatccataaggctcctacctacacaggccatgccgcgaccgccaccccttccacttccacgtggtctccctctcctccctctacccctgctcattgccttccttaccttttcgaagtttgcgggattttttgggcaggtagttgtgtaatggccatccctcagtccacaccagctgcacaccctagtacagagcttcttcccccttgcaccaagtgatacattctcttctggacctactgtccgctctttagtctttggtttgggtggtggttcttggcttatgacttcagctgatgtgcccgcaccattgttgcgtgcaacg

SEQ ID NO: 39276 - DNA, 536 bp, Oryza sativa
  Clone ID: uC-osroM202012f05a1
ctccttcaaatcgtccatgttattgcatcgcaatatagtgtaggtttacaaaacattaattccaagcatttgaattacatacattatcataggataggtaacacccatcgacatgtactaattcaacctcttctctaagaaaattttgaatggatacagaaacagaagcgttaaacaattaattcacagacgatgataagcagcacatcttagacattggcagcccagcaatttcgagtgtgcgtcctgagaagacgagcagcaagatcactggggattaggcggcctgctgttggcagccgagaccctggatccccactcgagaagctctttgctcgtgtcatctttgtgcacgatgatctcgatgaagcagaggcagtctttcttggcgcccgtcgccgtcgcgatcgcctctatcagctcctcctcagtccggaccttctttgtccagcagttgccgtcagagttgtggatggcgtcgatgaagccggtgtagtcccagttcttgatgacgttgtacggcccgtcgtggatct

SEQ ID NO: 39277 - DNA, 478 bp, Oryza sativa
  Clone ID: uC-osroM202012f06a1
tgtcgcgtggggcgtcgccgctgagcagccacggccaccaccaccgctcgcgcaagatccaccgcaccttcaacaacgtcaagatcaccgtgctctgcggcctcgtcaccatcctcgtcctccgcggcaccatcggcctcaacctctccctccccaaccagcccaccgacgccgacgcgctcgccggcgccaaggccgtcgaggacatcgaccgcatcctccgcgagatccgctccgacggcggcgccgacgacgacgacgccgccgccgccggggacctcgccggctccttcaacgccaccgcgctcaacgccacggaggcggcggcggcctacgcctccgctgtcgaacgctacgcgctcggccccaagatctccgactgggacggtcagcgccgccgctggctcaggcagaactctgggttcccgtccaccgtcgccggcggcaagcccaggatcctgctcgtcacgggctcgca

SEQ ID NO: 39278 - DNA, 376 bp, Oryza sativa
  Clone ID: uC-osroM202012f10a1
gattagatggttgcccttgtcagatacatcttaattatcttttcaaagtagatgagccaattatgaccgcatcaatatgtattgctgcattactgtaggtagggagggaataatatcgatcacctttaaaatttctttggatcgagaaaacgacaaataatttaatataaaattaaatcctagaacgacgacgatgagtaatatgaaacagaaggaagaacatgaataagcagtgcacattctagttgttcctgcctctgcttaaatccttccatggcctttctccatttgagttatgcatgtcccggcgacataggaggattgtgtcccccgtttgggccgcctgagaggtgaccaccatgatctgcttcaatgg

SEQ ID NO: 39279 - DNA, 421 bp, Oryza sativa
  Clone ID: uC-osroM202012f11a1
tgtgtttcggcctttttttttttttttcatttggtggtaggatgcaagctgaaaacactatcataaccctcgtagcatttgattggagaaacagatgttcacaagtagatacagagctaccgaaactggaagaacagaaacccgagggaatggacacaaggaacataactgaagggcaaagtgtttacattattatgattgagcccagcttgcaacaagtactaaaagtttctactgaggatttggtggcctggagttggcagcagaaaccctcgatccccattccagcagctctttgctggtgtcgtccttgtgcgcgatcacctcaatgaagcacaggctgtccttttcccccagtgccatcccgatcgccttcgttaggtcctgcttggactttaccttaaaaggccagcatttgccc

SEQ ID NO: 39280 - DNA, 351 bp, Oryza sativa
  Clone ID: uC-osroM202012f12a1
gtaagaagtattgtcgaggattagctcattttggtatataatacggcaggctgtaataattgtagtgaggccgcaacatcattatgactaatagcaagctccttaatcttaagacaacaaaaatggtagcataacatttcccacaaaagagaaatcataacatgcatcagctactttaggtgggggtacattaaaaaaaagaatagaatgaactcagtagctaccgcggtctttggatgataagagacgctaaatcgtctagtccgaatggcatcgaattgttcttactgctgggcacactgtacccttggtccagctccagcatcctcgtcggcgtcttcatcatatgct

SEQ ID NO: 39281 - DNA, 345 bp, Oryza sativa
  Clone ID: uC-osroM202012g02b1
gctggcccgcgtgcgagccccggcccggaatcccgggggcgccccacgcgtgttaatgcatggagggagagagagctaggggagttttgatcaggcaagtgatggctagctgtgacacggggaccaccatggcggcctactcgccgcttcttgatcgtgggagagcgtgcgcgctggatgagtatgctgcacatggtggctgcttctcgcctggattaatgggaggggccggcgtactgtacattaggacgaacgacccgaactggcacgataaaggtgtatgtatgctgctctctagctcgatctgctacagcattaatgcgtgtgtgcgctaaaaaagatatg

SEQ ID NO: 39282 - DNA, 520 bp, Oryza sativa
  Clone ID: uC-osroM202012g04a1
tttctcttttttttttttttttttttttgttttttttgggcacatacaaatcacaccagaatgcgcttccaatcaaacccaaatgtttaggccttgcgaccagtagtatacacatataccattggttctctctctgaaagaaccattttacagttgcaagatgcaatgttcttgcttatttgaggtagtttcagctttctaggccgaaaccgccttgcgcagtttgctgctgtccgctgatggcgtcaagctgtcgtagtattaaacagggaccttccagccacccgggcacatgaatccgtcaggggggctctggcagttcttggcaagagtacgcatttttgtgccagagatgaacaggaaatcatctttccttgatggatcgaaaaagtccattttcttttgctttgtgtcatatgcagccaccttgaaaggaaggatattgagcttctcaagcccaggagccatgctcaacacctttttcccatgatcagcatcatacaggtccctcttttcagtt

SEQ ID NO: 39283 - DNA, 529 bp, Oryza sativa
  Clone ID: uC-osroM202012g05a1
atcatatgatttccatctttatttgtgcatgcacgtcacatgacattacttactttatttgtgcacgtactagtagtagctcgtgcatgaatccagtgaagtgatcagtgatcaaagtgaaaatggatcaaggtctggttaattaccagccgtccatcacagaacctgatccaggagaccaggctcattaccagccgtccatccggtcttcttgtcccagtacctgttccagaccatgatgcccccatagttgggcagcttgttgatgaactgcagcacgtcgtagtagagatccttgtgcgacacgtagccgtccctgtcagcctccggcgacgcgacgacgccgacgaggacgcggctctgcgggtacgccgccatccacttctccagctcctccctcctcgacgcgcaccgcccgtcgccgaacaccttgacgtggatccgcgagaagagccccgtggacagcgccgcctgcagccgctggtccgggaacacgcacctcgccgtcgccgtcagcatcaccccgagc

SEQ ID NO: 39284 - DNA, 357 bp, Oryza sativa
  Clone ID: uC-osroM202012g06a1
ctatgggtgcaactcatcatgataaagcctacaatatttatcaaatatgaaacaaaaaatacagttccctctttcaaataccatgtaatgtaaaagtaaaactcctatatctatactacgaattttaacaacagtagctcaaaaaggatcattcttttttttttaatctcggcaccacaagccaaaaatcaatatacaacaactaatcaacctatgaacataaacaaaaagaaagaaagattacaacaacaaaagaacttatattattcatccagttggtcattggtgtgtgcaatcgaccacacgcccttgaacatcccagctgactgaagtgagaaatccgacacaactctgaac

SEQ ID NO: 39285 - DNA, 494 bp, Oryza sativa
  Clone ID: uC-osroM202012g10a1
ggaagactcagagcatccaagtttttaaccgaatagaaataaacgagttttaaacgactaacatagtgcacattgcgagcagatattaacggtccatgcaacgagtgccatggccgtgggcaaaacttaacgaacgctaagatatctcaaatgcagccagcataaccaccacttcaacgatgctcatttcttcttggcggcagccttggtcaccttggcaccggttgggtccttcttctccacgttcttgatgacgccaacagccaccgtttgcctcatgtcacgcacggcaaaacgaccaagaggagggtactcagagaaggtctccacaaccatgggcttggtgggaatcatcttaaccataccagcatcaccgttcttgaggaacttgggctccttctccagctccttgccggatcgtctgtcgatcttggtcaccagctcagcaaacttgacggcaatgtgtgaggtgtggcagtccagcactggggcgt

SEQ ID NO: 39286 - DNA, 556 bp, Oryza sativa
  Clone ID: uC-osroM202012g11a1
gtgaggaaggtcattttctcttgagttggacgaaacggtacagaggagtcgctctcccgtggcctggcttagcccgcgggggatcacgacgttcttcccttttgactctggcgatcgatgaatcgatccatccgtccatcatcgctcgcctcgattattcgacctatagctgcatctgcatgccagcctgctttcaggcgggcaacctagcttacatcccaatcagggcctcttcatcctccctgtattttctccccaatttctcttctcttctctactcttctcctatagttgttggccaaaaaaaaaactaagcaaaaaaggataaaaaatggttggttttacaattaagggccacttctttgtggcgctccctagctcagatgtctacgtagtgtttggtttttttcatcaactcctctgctcctcctctcgattgccaaccgtggtcctagctgaagaatctgtacaaggactttgatgatccgtgctaatacggaatccaccgttcggtcttccgctcccactgcggcgccaacaggtgtcccccccgacg

SEQ ID NO: 39287 - DNA, 482 bp, Oryza sativa
  Clone ID: uC-osroM202012g12a1
ataggagcaaaaaagaacttggaacaaaatcatttccatcatacaaagccaccgaatgttcttgtaacaatttggtctttcgcaggtggtgaataaaaatggaatttacaggatttacctcccaataaaactggttaggtcacttgcaccaccagccttcaaatgggtggtcagagactctgaggctctacccaaaacagcttcacaaaccaccactgttaccgcccttcgtgaagatcttcagagaaagccgttctcgatatgttctcagtctcaaaggggctgaggcctgaaaagggtccagaagagaacatggatgaagtgccatcagattcataggtggttgaggactgcctaacattgggtcgtgctggaggtgttggtatggattcctggaactcagagcgttggaccatcttcagtgactgcaccacctcgcccattgttggcctttggcttgcctccggtgaaacacaggcggc

SEQ ID NO: 39288 - DNA, 364 bp, Oryza sativa
  Clone ID: uC-osroM202012h01a1
gccacaagagccatagagtttcattctatacagactaaatcagtatatggacaaaattaccatgttacaactcaggattatcaaaacaaattaccatgttacaactattatacagactaaatcagtatatggacgtctatatcattggataattacaatttccaacatcagagggaagcttaatgaacacacaatttacaagttgacaccaaaccaacatacaagagggccaatcatatgttgaaatgaacccatatcctagctagttatggaacagtacaagcccatatgtaaaggatactactggagatgcaagctgggccaagtagaaatcaaatactgctactgagaactcccccatggt

SEQ ID NO: 39289 - DNA, 502 bp, Oryza sativa
  Clone ID: uC-osroM202012h03b1
tccccaatatccccgcttcaccccacgcttttttattgtagatctgtacctagaccccagtgtgcattttaaaaacaagtggtgtttactacaaggctaactactgcacaacactaccggcgacggaacgggctactaccaaggatccctcatcctcgagcgcctttgtgtggactatggcaagaagtccaaacttgggtccactatgtacccatgaccctcatgcctccacctctgtggttgagccatacaacagcgtcctctctacccactgcctactttagcacactgatgttgctcatctgatcgataatgaggacatctatgacatctgccgccgatcccttgacattgagcgcccaacctacaccaacctaaacagggttgtgtctcacgctatctcatccctgaccgcctacctgaggtttgatggtgctctgaacttgtatctcaatgagttccagacccaccttttgccctacccaaggatccacttcatgct

SEQ ID NO: 39290 - DNA, 540 bp, Oryza sativa
  Clone ID: uC-osroM202012h04a1
accccaaaggcccaaaaacccccccaaaacgttgaaaaccccccccatcccaacaaaaaaactctctccaaacaccctcccttcacccaaggggcaccccccgccccccccaccaaaaacctcccccaaacccccaccccccaaaaaaaaacccccccccccccctaaccccctacccaaataagccctccccccaaaagagagccccccccccacacaactaaaaaaaaacacccccctttaccccaaagcccccccccctctgaaaaaacccccccccccccacaaacttttccccacaacccattcccccctgttcccccccccccataccccaaacaacaccattctttgttaaacacccccccacccttgaaaaaaaaagcgctataaaacccccaacccccaattgtaactaatccccccataaaaaaccccccactccccaattaatcaccaataccccccccccaaaaaaaaaaccccccattaccccccaccaaagtacccccccacaaaaaacccccacccacccataaa

SEQ ID NO: 39291 - DNA, 57 bp, Oryza sativa
  Clone ID: uC-osroM202012h05a1
tttcttccttttttttttttttttttttttttggttttttaaaaaatttttgggggt

SEQ ID NO: 39292 - DNA, 84 bp, Oryza sativa
  Clone ID: uC-osroM202012h06a1
cttccgggcgattgatattgcacagacagtatggtacaccaacagtcacaacacacattcttctctgtttaacccaaacgccgt

SEQ ID NO: 39293 - DNA, 261 bp, Oryza sativa
  Clone ID: uC-osroM202012h07a1
acaatatcctgggagtttcaggacggcttatattcttcacaagcaaaacaagagacccaggtccatattatggggtttgtaaccacttacaagtgggtcgattggaaaacaaaatgcaactcattatcccaacttgcattaacagagggggtgggtcccgatgaacaccggccacgttttattctcagcatagacaaagcataccggtatctccggctcggggggcatggaataccatggcaagcgaaaggattctactgg

SEQ ID NO: 39294 - DNA, 263 bp, Oryza sativa
  Clone ID: uC-osroM202012h10a1
aatagcgtgcgataagtcacttgcgttatatcaaattcatggaagtgtgcagcaaaatagtgataacttaaccactgaggcattcccttagtataacctccaaacctccattcccttagggcccgggccccaaatacctcctgcacacccctacctaaatggttcccatcctggtgggccactccaggggcttcgaagccgggggcaagctcaacgtaggccttttttttccattaaggcctgaccaaagggtcaccttcctt

SEQ ID NO: 39295 - DNA, 361 bp, Oryza sativa
  Clone ID: uC-osroM202012h11a1
atgggagcaaaaaagaacttggaacaaaatcatttccatcatacaaagccaccgaatgttcttgtaacaatttggtcttttcccagggggggattaaaatgggatttaacaggtttaccctccaattaaacctggttaggcaacttgccccaccagccttaaattggggggcaaaagcctttgaggctttaccaaaaccagtttaacaaaccaccattgttaccgcccttcgggaagatcttaaaagaaagccgttctcgatttgttctaagcctaaaagggcctgaggcctgaaaggggtccagaaaagaacatggatgaagggccatcagattcatagggggtggaggactgcctacca

SEQ ID NO: 39296 - DNA, 426 bp, Oryza sativa
  Clone ID: uC-osroM202012h12a1
gggagtcatacacacacacacacagcacatttattcctcgagtatttacatcagcaagatgattatccccttcctgttacaagcacttgatagggtttaacataatcatcatcaaaacagggtttatagtatgtacagcccccatgaacagattacagtaagcatctggagcacagataaaaacttgcaagctctttcagtggtgcacacaggctgtatctgccatggcaatctcagtttcctctgaaagactgaagaatatccatgaaacagcaatttggctgtcttctaccagctcaaacttgctgcacaacttttcattcttttctagctcatttttccttcttacttcatcaacaaaagtgcgtctcggtgtcgccctaaaagggtcagtgcggttgctgcgatgtgatgagcagtcaaccc

SEQ ID NO: 39297 - DNA, 500 bp, Oryza sativa
  Clone ID: uC-osroM202013a05b1
gcaccgctccggacttcccgggcttagaagttcagtcgcttttcttagtttgcttcagcaggaggcatcaagcatgtttaaaggtcccacagcactgcacaatggcattcagctggaagcatctagatccttccgtggaccaaaccaggtgcatctcgcgcagttgcaacatccggccttatttcaccagcctatgcctcagcagagcagcctccagggcttgggtgtgagcccacaatatcagcagcatgacgctccatcagttgctgcaagaggccattaacactaacacccgtgtcttggcgcagtagcagcagcaacaacaacttcaacatgctcctgctaacagtggtcttgcattcaggaggaacggctatcaccggcagtgccgctagcggagatcatatgaataacaacggcgcggcgaagggtgggactccaatggctacaacatgtgctagcattgtgatcaacaatacagccagcatcctcccagcaga

SEQ ID NO: 39298 - DNA, 371 bp, Oryza sativa
  Clone ID: uC-osroM202013a10b1
acactgcagcgatctagctaacacattccttttcttcagaaaatgcagcagtatggaaagatatagtgtccagaaaaggcaaaaactactttatttctagttaattctttgctatgaatagactatggcatgttgtgctcaaacagaagagcaatgatatattgtgcaagaatacattttattggatgagttgtgcaggatattgtagacgagtccatgccacctttcttgtttacaacgaataggttactccgtaattcaattttctgttcccgactcctggacagaacagccctggaacagactagtatacttcccaggtcaatggttgttctaaaaccttgaacagaacaggcaccgagctggtggac

SEQ ID NO: 39299 - DNA, 318 bp, Oryza sativa
  Clone ID: uC-osroM202013b01b1
gacgtgctaggtcttatatagtgtatcctgaaaccaatacacaggccgctggtcgacaacgtacagactggggacagcgtgacgtcacccaactcaatcgtctagcagcacataccacattcgcctgctggcggattagcgaataggcccgaagcgatcgcccttcgcaacagctgaccagtgtgcatggtgaatgggacacgccacgcaccctgtcattaagcacgaagggcgtggggggtacgcgcaacgcgaccggtgcacttgacagtggcctagggcccagtgcctgcgctttctgccctttcttcctcgtca

SEQ ID NO: 39300 - DNA, 147 bp, Oryza sativa
  Clone ID: uC-osroM202013b02b1
gacacgccacgcagcggtgcattaagcacgaagggcgtggggggtacgcgcaacgtgaccggtgcacttgccagtggcctagcgcccagtgctcgcgctttctgccctttctttttcgctacgtgcgacggctttcccctttaagct

SEQ ID NO: 39301 - DNA, 216 bp, Oryza sativa
  Clone ID: uC-osroM202013b03b1
gtttattaagaagaagaagaagaagacgcgaagctgggtgcgtgttcatactaacgatacctaactcgccttccaagccgcagaattaccccgtcgttgatgcggatggaggcccggggcctcccggagcttgggtcgggggcgagggacccagccggtactcggcgatagttgatagtggcgtcagcagcggaagccggcgatgccgctggctgg

SEQ ID NO: 39302 - DNA, 462 bp, Oryza sativa
  Clone ID: uC-osroM202013b05b1
gccaattcaaagcgaacctaagctcgcttcgtctctctctcggattcgatcatggcgcagagggagaagaaggtggaggagccgacggagctgagggcgccggagatgacgctctgcgccaacagctgcgggttcccgggcaacccggcgaccaacaacctctgccagaactgcttcttggctgcctcggcgtcttcttcttcttcttccgccgctgcctcgccgtcgacgacgtcgttgccggtgtttccggtggtggagaagccgaggcaggccgtacagtcgtcggcggcggcggcggtggcgctggtggttgagcggccgacggcggggccggtggagtcgtcgtcgaaagcgtcgaggtcgtcgtcggtcaaccgatgccacagctgcctgaggcgggtgggcctgaccgggttccggtgccgctgcggcgagctctactgcggcgcgcaccggtac

SEQ ID NO: 39303 - DNA, 574 bp, Oryza sativa
  Clone ID: uC-osroM202013b07b1
ttgtagaagagggaggagtagacgcaagcccacgcgaaccgaatcgaatcgaatcgaatcgagaggagaggggaggagagagcgcaaggaataatccgtaatccgttcgcggcgaggaggaggaggtgggcccagcgatgcaggcgcacagatcgccggcgatggtggggggcggcggcgcgggggccgtcgggccgccgtcgccggcgacggtgccggtgaggcggcgctgcgagggcacggccatgggggccatcacgctcgacctccgccccggcaacggcgtcaggcccttcaccctcgggatgccgatttccgatgcgttcgcgcagatagagggccagccaacactctacgacgttgtccacgtgaagtacttcgatgaggagcctctaaagttggattctgtcataagctttcctgaccatgggttccacctgcgctttcaacctaggtcacagaggcttcgtctcattgagatctatgacggtgaaaagactgcaactgcgaaatgcaaagtcctaattggtggcccatcaacattagccacttttggtgctgttatggataattc

SEQ ID NO: 39304 - DNA, 406 bp, Oryza sativa
  Clone ID: uC-osroM202013b09b1
tcctttaccgagaagaagagaaacctctcttctactgatggatccaactactacctacccgcacgccgcaatgacgctcgccaccagctcctcgatggccggtggggcggcggtggttccacgcagcgcgacggcgacgacggcctcggcgttcgtcacgatgaagcggcgcgccacggccgtgcgcgccgtacacgcggcggatccgtcaaagaacccgcccgtcggcgtcccgtccgaggcgaatacgtcgtcaccgtcggtggcggcgcccgagaaggcccccgaggcggccgcgcccgcgcctgtggctcctgctccggcggacactaaacatagtggcccaggtgaggttggcctgcgacaacttgaggaccaaaaaagggcttgtatttcccgaaatccc

SEQ ID NO: 39305 - DNA, 542 bp, Oryza sativa
  Clone ID: uC-osroM202013b12b1
tgtattctcttgcggacacacgagccccaggaaggaaagcagcgagacccccggatcgaaacgcacaccggcggcgatggcgatggcggcgctgcgacgggaggggaggcgcgtcctcctctcctccaccccatccccggcggccgccatggccgcgcgctcccccggcgtcgcccaccaggagattgccccactaggcgcacgttctgtttcaacacaagttgtgagaaccctcatgaagagtgttaggaacatccagaagattacaaaagcaatgaagatggttgcagcatcaaagcttggagctgttcaaataagaacagaaaattcacgtggtctatggcagccattcaccgctcttcttggggatgaccatagcgtcgatgtcaagaagaatgttattgtagccattacctctgacaagggtctttgtggtggtatcaactcaacgtcagttaaagtcagcaaagcacttcacaaagtgacttctggaccagagaaagtaagcatgtatgtcatattaaggagaaagggtaaagttc

SEQ ID NO: 39306 - DNA, 458 bp, Oryza sativa
  Clone ID: uC-osroM202013c04b1
tattgtttcaagaattctatccatggtaccaccttggacacgagtttaccgtgtacaaagagatatccctatgcctcttgttacttctggtgttgaaaaaggtaatcttcgtgagcttgctttggctcgaatggaagatttaggcttgaagtgccgagatgttagaactcgtgaggcgggaattcaggatatccatcacaaaattagacctgacgaagtagagcttgttaggcgtgactatgctgcaaatgagggctgggagacctttctctcatacgaggatacacagcaggatatccttattggtctgctgcgattgcgaaaatgtggccgcaatgttacatgccctgagctagtagggaggtgttcaattgtccgtgaacttcatgtatatggaactgcagtccctgtacatggtcgtgatgcagacaaactacaacaccagggttatggtactc

SEQ ID NO: 39307 - DNA, 526 bp, Oryza sativa
  Clone ID: uC-osroM202013c05b1
ccctctcccaaccacgaccgcggccggccggcgaatcgcctcgattccggcgtgcgaattcctccacctcgccgccgccgctgctcgcgaccgatcttcaccttccgcttccccccccctgcagccgattggactcgatcctatcctatcctatcctatccccgaacgggcgatctggtaggcgagagagaccagccatgtcgggggtgttcggcaaggtgttcgggaagtccaaggcgcagagccaggccaccgcgctggcctccatcgacaagctcagcgagactcttgaaatgctggaaaagaaagaaaatttgctagtgaagaaagcgaatcttgaggttgagaaggccaagaccttcactaaagcgaagaataaaagagctgcaatacaatgcttaaagaggaagagattatatgagcaacagattgagcagcttggtaatttccaattaaggatacatgatcagatgataatgctggaaggtgcaaaggctacaacagaaactgttgatgcattgagaac

SEQ ID NO: 39308 - DNA, 538 bp, Oryza sativa
  Clone ID: uC-osroM202013c07b1
gttttcgtactcgcctctctccgcgccctcctccgccgccgctcgccgtcgttcgtctccgccgccaccgccgccgccatgagggagtgcatctcgatccacatcgggcaggccggtatccaggtcgggaacgcgtgctgggagctctattgcctcgagcatggcatccagcctgatggacagatgcccggtgacaagaccgttgggggaggtgatgatgcttttaacaccttcttcagtgagactggtgctgggaagcatgtcccccgtgctgtcttcgtcgatcttgagcctaccgtgattgatgaggtgaggactggtgactaccgccagctcttccaccctgagcagctcatcagtggcaaggaggatgcagccaacaactttgcccgtggtcactacaccattggcaaggagattgttgatctgtgccttgaccgcatcaggaagcttgccgacaactgcactggtctccaggctttcttgtgtcaacgctgtggggaggacgggctccgtcttggttccttctcctgagcgt

SEQ ID NO: 39309 - DNA, 430 bp, Oryza sativa
  Clone ID: uC-osroM202013c10b1
ttgtctcctcctccttcttctccatcgccggcgagagagagagagttagctagctaggatgggttctacagccgccgacatggccgcggcggccgacgaggaggcgtgcatgtacgcgctgcagctggcgtcgtcgtcgatcctgccgatgacgctcaagaacgccatcgagctgggcctgctcgagacgctgcagtccgccgccgtcgccggaggaggggggaaggcggcgctgctgacgccggcggaggtggccgacaagctgccgtccaaggcgaacccggcggcggccgacatggtggaccgcatgctccgcctgctcggcttctacaacgtcgtcaggtgcgagatggaagagggcgccgacggcaagctcatccggcgttacgccgacggtctcgagtgcaagtggctgactcccaacgaggac

SEQ ID NO: 39310 - DNA, 411 bp, Oryza sativa
  Clone ID: uC-osroM202013c11b1
atggtttgctttttgtcttgtttttaaacagtgtcctaaccacaggttccgccttccttggtcacattcatacaccgatggtacattgatatacaatactgctcaaattctaatatactgctcacagaatgacacaccaaaaaattctaaggttatcaggttcttccaagatgctgcaccctgcaaacaggttttctgtcaacagtgggctggagccttaaaatcgtggtagctgtacaggaaaaaacaattgctcaagattccatattcccagcttacacacctgtggcttctatatcaggaggccggtcattgtaccctaaaacttttgctttttctagcttaaaactataagctcttggtctttgctcttaaagatacatgtacccaatgatggctcctatccttttt

SEQ ID NO: 39311 - DNA, 529 bp, Oryza sativa
  Clone ID: uC-osroM202013d02b1
gtttctgctgaacaggggagggccgggcggcgatctccatcgcagcggaggggaggggaggggatcctgaattgcaggcgtagtctggtcgtcgtggcggtgaggtgagggggtgacggcgatggccaacagcgagtacgagtacgtgaagagggagttcgagctcgacagcctcctcccgccctctaattggatcgttgtgcgcatcgacggctgccacttccaccgattctccaagatacatacctttgagaaaccaaatgatgagcgtgctttaagattgatgaacgcctgtgccacttctatgctcgaaaagttcccagacatagtcttcgcatatggcgtcagtgatgagtacagttttgtttttagagaggaaactgaattctatcaaagacgagaaagtaaaattctatctttatgtgtttcctacttcacttctgtgtacgtgatgaagtgaaagatttctttcctataaggagttgaaagagccttcatttttgatggtcgagttgtatgctatccaaac

SEQ ID NO: 39312 - DNA, 532 bp, Oryza sativa
  Clone ID: uC-osroM202013d09b1
tctctccatcttcctctctctcccagtgggtgcgtttgtgcgagacttgaggctgagcgagaggggaggagagatcgtgctccgcgagggaacggcggcgaggagctgggtgcatctcggttggacttttcctactggaactgcagtactttcaacatgctttttgcaaatgcctgcattaaggatgaataaaatgttaagcaccgactatttagggacgcaggagcttcattcattttgcaagaccaccgaaatattggaagactcacagtctcaagagattgcactcgatagaacagcggtggggtcaacacttctaagtcatcaaaatgtttgctctacttctgaagtatcagggggaaactttggaatcgctgaagtcagttttttacaggatgaatatgatgcaaaaaccaccggtgtactgccaccatcatttttgttcctgggctttagatctatgctccctatatcagtaccatcatcatcatcatctagtctggagactgtcctcttttctgactcaacgtac

SEQ ID NO: 39313 - DNA, 454 bp, Oryza sativa
  Clone ID: uC-osroM202013d11b1
aatcagtgtcctaatcacaggtttcgccttccttgttcacatccatacaccgatggtacattgatatacaatactgctcaaattctaatatactgcacacagaatgacacaacaaaaaattctcaggttatcaggtttttccaagatgctgcaccctgcaaacatgtcttctgtcaacagtgggctggagccgaaaaatcgtgggagctgtacaggaaaaaaaaattgctcaagattccaatagcccagcaacacacctgtggctccgataacaggaggccggacatgtcaccctaaaacttatgcttctcctagcttaaaactatagctcttggtctctgccgataaaaatacatgtacacaatgaaggctccgatcctttctgtgcaatgtcgccttgagtgcaggctctcattcagatcgcatcctctgttgaagagcaacaaaatggaga

SEQ ID NO: 39314 - DNA, 155 bp, Oryza sativa
  Clone ID: uC-osroM202013d12b1
actatcctctacgcacctctgcgcgcgcgccacctgcttgacggatagccccgacgctcagacaatgcaggcgccgccgacagcgacacaaccaggcgcactgatgatagtggcactgaacgataacggaaagcctacccggcgagccacgaaag

SEQ ID NO: 39315 - DNA, 543 bp, Oryza sativa
  Clone ID: uC-osroM202013e02b1
gcttgatcaaggattgcagtgtggtggtcctctacatgatcagttggccgcgagccgaagcatattgttttagatgaaaccaatccaggcagcaccatggatcagatgtctagtgtaatattgccctgcttgtagcttcatcactacctgtattgaagtaattaattatggggaatttttcggaacataacagagggggtgtggagggatctttgtgccatgttggtgactgataacctgtgatccataattgttggcaatactgagaatgtaacgaaacgaacgtcaagaacttgatgccggtggtattttcagacagtgattgctgctagtgctgaacactgatcatgcatgaagtggactttgtattcaatcatggatccagcttttgtgaggtggatgaggagaattctattcactatgttcttctggtcagtgatgcactgagaaacaccggttgccatctgattgaggggtttcagatcatgctgtacttcacacatacttatccacagtttatcaatttgctcattggtgttcccc

SEQ ID NO: 39316 - DNA, 397 bp, Oryza sativa
  Clone ID: uC-osroM202013e03b1
agtgagggagccaaagaaagctctcatcttcctcttctcaaactccatctctctctcttcttcttcttcctctcctcctcctcctcgcttggaccccggattttttgcaagggggtaaggaggcgggaggagatggggagggaggagaggccgccgctgtggcaggcggcactcgtcacctgtgtctccgccttctctgccaccgggctcgaaggagtctacctatccatgccggactcctactacagcttccacaagatgcctcgcaacctcatggagctccaatctctcactggacatcttgagaactataccagtgattacaccatacaagtgttggtgggatactgttccgagaccatcttcatgcaaacccttatgatctcaggacaataat

SEQ ID NO: 39317 - DNA, 507 bp, Oryza sativa
  Clone ID: uC-osroM202013e10b1
tatctaacagtaatatcacagaggcgtccggtaactgaagcagagaaggaccatgctcttcaaagggcaagagagtttaaatctaagaatccttttgccgtgcaaataatgatggagtcatatgtctatgttggatttttcatgaatatcccatgtgaatttgtccgtgagtgtcttccccataccaacaaaaggatcacactctgggatccacaagggaaggcttgggaagttaactatgtctactacagtgatcgttctgttggttctttcagtggtggctggggcaaatttgctgttggcaacaatctggagaagtttgatgtgtgtgtcttcgagcttgtccagaaggataacataaaagtgcacatctacagagttgttccagaaattactccgcacaaactccgttctgacccgaagtaacattgctatgtcggcatgttggaggcttcaatccattgatctgaggctgtagttggcaagtaaaaaactatttatatgttg

SEQ ID NO: 39318 - DNA, 338 bp, Oryza sativa
  Clone ID: uC-osroM202013e11b1
ttactaatgtggttccattgcttgcaagaacttgatgcatgcggcttgaacaagaatgaacaaagatttgtcgtgagcttgtgaggctagtagaacaaggtgacaagaagagcctatcgaagtataagcaagatttctggggaggactgggaagtatagaaaaggcacagggaggaaatggtcttgttgagttttgagcagaaaacatcaattatagaggagtgtggcaaggagatatgttaaggagatgggcaagaagggaggctggatcactgcactcaagaaggctttcacctctggccctaaggacaagcctacaaatgggcaggttgtaacgc

SEQ ID NO: 39319 - DNA, 353 bp, Oryza sativa
  Clone ID: uC-osroM202013f07b1
ggggaaaacacccttctttcaaaattagagttcctttttccccaaaaatttttcaaaaaccgggggaggggcccccgggtcttattaaacgaatttgaaacagggttgggaagggggccccagggaaaaggggtgcccaaaaataaggggttttttttttttttttttttaaaacccccaaattttggggcctagacctaactgggggccaggggaggggcctcccttaagggagccacggggggccgttaaatctcctaagcccccccacaaccccagggccaaaactccagggccgagcctaagaactttatattggggcttccagggggtttaaaccccaggggtttttt

SEQ ID NO: 39320 - DNA, 361 bp, Oryza sativa
  Clone ID: uC-osroM202013f09b1
gatcaatcaatcagttcggcttagttagttgccaccttagctaagctagctagtatagctctagcttcttcttgctcgctcgcatgggtctcgaggtgctcatggcgagagaccagctgctgcagcgcccgaggtggcggtacgagcggctgcgcggcgacggcgacggcgacggcgaggaggcggcggcgggggtttgcagggtgaggcggcagctgcggctgaggaggagagtggtggccgccggcgccgccgggaggatggcgcgcggtcggcggcggcggcggcggcgggaggaagaaggtgaggctgatgcggctggtgttcctgctcccggcgcggcgggtggccgcgctgttcg

SEQ ID NO: 39321 - DNA, 548 bp, Oryza sativa
  unsure (1)..(548): unsure at all n locations
  Clone ID: uC-osroM202013f11b1
ctcaaattatttaaataacacttttatcttgtattgacatgtattggtttgggtggttcggacagtcttttctttgttatccatttctaaacatgtgggctctgttgatgtacttagtggataagtaatatagagctccagcagaaattatgtcttctggtaatttttgttagacatattatctgagttactgttgagcaatttaatgtgcgaatggttggtacaaccattagaagactaaaaaatcctgggaaatacaaatacacacaagcaggtatttttactgcatgcagccttgatgtttttttttcttagaacatcttttcccttttactctcggaaaagatcaaaccatttgcttctgcagtaggcacaatgtatcatttgttttcccattctatgaacttgcttctcgtgtgtattaactggagcaaacaagcttgaaaaatgttggcgatggcacatgtaagcttagatcactttatgcttttaaaagcagcttatctgcaggcatggngtttctacattctgngattattaggttgctg

SEQ ID NO: 39322 - DNA, 464 bp, Oryza sativa
  Clone ID: uC-osroM202013g03b1
atttcttttcctctactgaacccttccatcagtcgtgctgttcttcagctcttcagcatgtgtatatgattcatatcatttctcttgctctactgaagccttcacccgtcgtgctgtacttgctggcatgttacaggtgtagtgaagaacaaaaaagctagtgcgccccacaaggatacggcaaagtatggcggaagctgcagtagtccaggccctcattaagattggatctgcttttggagaaacagcactgccattactccaagacttcataaagaaagaagcagctctgttacaggaactaccagagctcgcaaaatgcattcggggggaattggacatgattagtagcttccttttgcaagtgcggtcgaagatccacagcaccgacaatgaagttctgaaacgcttggtggtgagagtacgccaggtggcctaccatgtcgaggacataatagatgagt

SEQ ID NO: 39323 - DNA, 441 bp, Oryza sativa
  Clone ID: uC-osroM202013g04b1
ctcggttatcggagcggttagctgcggcgatgtcggggcgcggcaagggaggcaaggggctgggcaagggcggcgcgaagcgccaccgcaaggtgctccgcgacaacatccaggggatcaccaagccggcgatccggaggctggcgaggaggggcggcgtcaagcgcatctccgggctcatctacgaggagacccgcggcgtgctcaagatcttcctcgagaacgtcatccgcgacgccgtcacctacaccgagcacgcccgccgcaagaccgtcaccgccatggacgtcgtctacgcgctcaagcgccagggccgcaccctctacggcttcggaggctagacgagtacagattcgatggtgttgggcgtagcaacgctagcattattatgtcgtgtgcttcgtgtgtgtcgatgtgtctgtgactccttgtgttctagtc

SEQ ID NO: 39324 - DNA, 351 bp, Oryza sativa
  unsure (1)..(351): unsure at all n locations
  Clone ID: uC-osroM202013g08b1
tcttatctgccattaccgaagccgagcaggcgaggcgaggcgaggcgagcggacgccatggagcccggcgtgagcatcgagtccgggtcggcgatccgcgtggcggtgctgccggtgggcgggccgatctcgccggcgcgcctccgcgactacgcggcgctggtggcgcggacgcgcgcgtcgacctcgctgctgggcctactactcgagcaccagaagagccttnggcaccagccgggggcggggtgctcgctagttggctcgggtggtgcctgccggggaggacttccagtcctcccgcaaggtgctcgccgtcgtcggcatctgccaccttccgttcttccccgatct

SEQ ID NO: 39325 - DNA, 423 bp, Oryza sativa
  Clone ID: uC-osroM202013g09b1
tttttctgcgaaagctagggtttcgtgcgattcacctcctcggcgacgaccgagaccgcgagcgatttcggagggctcgatcgatggcggctgagggagagaagaagatgatcaccctgaagagctccgacggggaggagttcgaggtggaggaggcggtggcgatggagtcgcagacgatccgccacatgatcgaggacgactgcgccgacaacggcatcccgctccccaacgtcaactccaagatcctctccaaggtcatcgagtactgcaacaagcacgtgcacgccgcggccgccgcggtctccaaggccgccgacgacgccgcgtccgtcgccgcagccgtgccgccgcccttcggcgaggacctcaagaactgggacgccgactttgtcaaggtcgaccaggccaccctttttgacc

SEQ ID NO: 39326 - DNA, 463 bp, Oryza sativa
  Clone ID: uC-osroM202013g10b1
ttcatttcttggtcttcgtctccgtctccgtccttgggttgatatccagaatcagtcggtttggtttgtcagcaatggcgaggctagccggcgttgctgctctctcgttggtgctcgtcttgctcggcgccggcgtgccccggccggcggccgccgccgcggcgaagacgcaggtgttcctctccaagctgcccaaagcgctcgtcgtcggcgtctcgcccaagcacggtgaagtcgtgcacgccggcgagaacacggtgacggtgacgtggtcgctgaacacgtcggagccggcgggcgccgacgcggcgttcaagagcgtgaaggtgaagctgtgctacgcgccggcgagccggacggaccgcgggtggcgcaaggcctccgacgacctgcacaaggacaaggcgtgccagttcaaggtcaccgtgcagccgtacgccgccggcgccggcaggttcgacta

SEQ ID NO: 39327 - DNA, 341 bp, Oryza sativa
  Clone ID: uC-osroM202013h01a1
gtcgccgccgccgcccgccgcgccgtggagcttccacacggcctccagcagctggctgcacccggcggcgttgctgcaggagatgcggcggccgcagacgatctccaggatgacggcgccgaagccgaacacgtccgactcccgcgtcgcgcggccggtgtggaagcactccggcgcgatgtaccccagcgtccccggaacgccgatgatgtcggagtacgacggcttgacggactcgagcgcgcgggcgaggccgaagtcgccgagccgcgcgttgaaggcggagacgagcatgacgttggacggcttgatgtcacggaggatcaccatgtggatcgact

SEQ ID NO: 39328 - DNA, 364 bp, Oryza sativa
  Clone ID: uC-osroM202013h02a1
agctgcaaacagcataggtgctcttcattgttaagggctaatactaggacacattagcaggtaccaagtataaaacgcccccaaccatcaagttggtgcaaaaaaaggagtgattgggccatctcaccacagacctaaaacagctgagcaactgtatacagggatgattggtttgatccaaatacatgttcttaagtgttacatgcaattgaaggaagaccttttacaatctacagggcataaattatcttctcatgatcagagaatgcttacaggtctgatgtcccctcatggatagaccatgataaggacttggtgccacttgcccttttgaagcgccggtgtctatcttcagcaaacttga

SEQ ID NO: 39329 - DNA, 425 bp, Oryza sativa
  Clone ID: uC-osroM202013h03b1
ctagcctctttccccatctcctcctcccagaactagaatttcgccaccccgaatcccttccatggtaggacttccgtttgattccgggtcgaatccgtcgcctccgatgccggaacggtgaggttttccctccctttatatggacaacacgcgtttgttttttctgttgcgcaggtttcagatcttggatggacttgctcatccttcggcggccatggatctatcggcggaagctgctgctgctgctcgtcctcgcgttcggcgagtcagatctggagccgatctgacctcttagaggtccggttggggcatgctccgtacgagctggcgtggatgaaacggccgggcgagggaagaagcttgtcgtcgcctggatcctctccatcggggcctcgcgcgatgatgtctctttgtattgataatta

SEQ ID NO: 39330 - DNA, 501 bp, Oryza sativa
  Clone ID: uC-osroM202013h06b1
atctccagctgatcaagagctcttaattagctagctagtgattagctgcgcttgtgatcgatcgatctcgggtacgtagcaatggcgtccaaggcgttcgctctgttcctggccgtgaacctcgtcgtgctcggggtggcaagcgcctgcggcggcagcccgtcgtgcccgacgccgacgccgtcgaccccgacaccgtcaacgccgacgccgacgccgtcggcgttcgggaggtgcccccgcgacgcgctgaagctgggcgtgtgcgccaacgtgctgggcctgatcaaggccaaggtgggcgtgcctccggcggagccgtgctgcccgctgctggaggggctcgtcgacctcgaggcggcggtgtgcctctgcacggccatcaggggcaacatcctcggaatcaacctcaacctccccatcgacctcagcctcatcctcaactactgcggcaagaccgtccccaccggcttcaagtgctaagcagcgtgcatatgcaat

SEQ ID NO: 39331 - DNA, 348 bp, Oryza sativa
  Clone ID: uC-osroM202013h07a1
gggacgggttatattcttacaaagcaaaaaaggagactcaggtccatataatcagcactcgctacaacttacaagtcggtagattggaaaacaaaatgcacctcattttcccaactaggattaacagagggggtgggtcctgattaacaccgaccacgttttattgtccgactagacaaagcataccgggttttacggcttgggcgccatggaataccatggcacggaaaagggttctactgggtcttggccatgtgggggatcagggcggtgacacggttgctggaaccccactccttgtgggaccaaggcgaaagcttgacaaagtttttcgtaaaagcaatttca

SEQ ID NO: 39332 - DNA, 311 bp, Oryza sativa
  Clone ID: uC-osroM202013h07b1
gcttctctcctcctctaatctcaagtctctgtctagtcgtcctcgcatctccactcgccatgggcaagattaagatcggaatcaacggtttcggaaggatcggcaggctcgtggccagggtggccctccagagcgaggatgtcgagctcgtcgccgtcaacgaccccttcatcaccaccgactacatgacctacatgttcaagtacgataccgtgcacggtcaatggaagcacagcgacatcaaaatcaaggactccaagactctgctcttgggcgagaagcccgtcaccgttttcggcatcaagaaccct

SEQ ID NO: 39333 - DNA, 332 bp, Oryza sativa
  Clone ID: uC-osroM202013h08a1
acaccaatcatcccaagcaaagaaatgataactgacagagtgattgtttagacatgcttcaaacataaaaaaacacgcgcaaagccacaatttattatcagtgttgaagcgacatcatactatcatggagacggataacaaatagtgtccatgagacgaacgatgaaacgactgagcaggagcatcttttattcacgcagagtactatggctggcaagtgatagcagcaatcgatggccccgtagaagataacgcaccggaagcttaatcatcgtactcctggcggcgatggtggtggtgcttctgataacgctgcttcttttcatcatcag

SEQ ID NO: 39334 - DNA, 335 bp, Oryza sativa
  Clone ID: uC-osroM202013h09b1
tttttcgggggggcccgtctcggctgcggcggcggcggcggagtaggccacggtggtggtggtggtggcgagtggggggaccatcgccgctggtggtcggttcagtcgggcgggcggtcgggctcaccggtcgttgacgaggagtttggttgaggggggccctgcggcatcagcggcggcggcgggatgtacgtgccgcagccatctctctccgatgcggccggccgcgacgccggcgaccagcctagggtttaccaggtttggcggggaagcaacgaattctttttgcgagggaggtttatatttgggcctgatgtgagatccatattttttac

SEQ ID NO: 39335 - DNA, 381 bp, Oryza sativa
  Clone ID: uC-osroM202014a02b1
ccaaaggccccagcgaatgtttcctggcgcaagccacgcgccacggggaccttgagctgacggtatgccggcgggcgcacgaggcagaacccatgccgggccagcgcatccaagcgcgcagctggggtgacgacgcacgacggcggccagacggctgcccggccgtcaggcgacccacaaaggtggcgctcacgcaggagggagatcagggacctgcaccacctatgaggtggtcgggcgccgcccgcaagcagaggaaaccggcggggactgcggccgatgcgacggcaactccgaagggcatgaggaggccatgcctgttggcgctcgtaccggggcagggacacaggctcccaaaagggccgtaggtgaccgcctgtg

SEQ ID NO: 39336 - DNA, 445 bp, Oryza sativa
  Clone ID: uC-osroM202014a03b1
gctattcctttgagcaagcatggctgctctgaggtatttggaccttagctggacacagattgaacagctgcccagagaagtttgctcattagtaaaccttcagtgcttaaaccttgctgattcacacatagcatgtctgccggaaaattttcggtgacctgaagaacttacggttcttgaacctcagctacactaaccatcttaggaacatacccagtggtgttatatctagactgtccatgctgaaaatattgtacttataccagagtaagtactcaggctttgaattggagttgagcaaaaacattacgggcagaaatgatgaattcagttttaggagagctgagatgctctcacacagggctatccctgggtattactgtgagaagtgttggtgctctccgcacactatcgcttgtttctgatgcctacgtacaccttcttg

SEQ ID NO: 39337 - DNA, 297 bp, Oryza sativa
  Clone ID: uC-osroM202014a10b1
aaccggtgttcaccatcgtggtatacttgagggctggtttggagctcatctctggaatccacgtgccattgttcttcttgcgacgactcttttcgtgtttgctccattggtgagctttaagcgtctggattcattgagatacacctctgccctatcggttgctcttgctgtggtttttgtcgccattactgctggaattgctatcatcaaactcttcaatggaactgtagcgatgcccatactctttccagaactagatggtcttagatccatctggaagcttttcacagctgtccc

SEQ ID NO: 39338 - DNA, 488 bp, Oryza sativa
  Clone ID: uC-osroM202014b02b1
aacagaattcagagataccgtagttgcttctattctcgaaaatttactgaaaattccacaaaggaaggattacatcatgactgactattccctaagggcacagatcaaaattggtaagatccactaattgaacacaattgaggaattgcaggtacctgtttctgccatctctacagttatctagtggctctgaaaatatatcatcttagcattttaaagctaatctatctctccatcaacaatgaaatgcctcataagaacaatttctttcacaagattcctgtaggtgaatggtcggacagcggccctcagaaagtgcccaggagccttgctcttgcgcttatcttttgcgcttctgccccttggactctcctgctgctcatcctcatcctcaatctgctcctgctgctcatcctcatcctcagtctgctcctgcttcataaccattgtgtttgcacgggccattctcaattccatctctttctcct

SEQ ID NO: 39339 - DNA, 416 bp, Oryza sativa
  Clone ID: uC-osroM202014b03b1
ggcgatgaaatatatatatacatatatatttattccaatccaatatatcataattcatacatcatatcacccatacgaaagtaagcctgcccgtcctgatcacctcactttatttgtgcattacattacattatccaacacacacacacacacataccccaatcttttatcatatcattcccatctttatttgtgcatgctcgtcacatgacattacttactttatttgcgcacgtactatgtgtagctcccgcatgaattcattgaagtgatcactgatcaaagtgaaaatggctcaaggtctgggtaatttcacattggtccatcacagaacctgatccatgagaccattgtcattaccagccgttcatccgggcttcttgtcccaggacctgttccaaaccatgatgccccca

SEQ ID NO: 39340 - DNA, 514 bp, Oryza sativa
  Clone ID: uC-osroM202014b08b1
ttttccttctcccaccttctcccttctcctcgctcttccccctccgccgccgccgcagcggagcagctacagcaggcgagcgacatgggagggtttgtcaagacccagaagacccatgcctacttcaagcgtttccaagtcaagttcaagagacggaggcagggcaagactgactacagggccaggattaggctcaccaaccaagataagaacaagtacaacacaccgaagtaccgctttgttgtgagatttacaaacaaagatatcacagctcaaattgtctatgctaccattgcgggtgatatcgtgatggctgctgcctactcccatgagctgcctcgttatggtcttgaagttggtctcaccaactatgcggcagcttactgcactggcttgcttctggctcgccgagtgctcacgctccgtggtttggaccaagagtacgatggcaattgtgaggccacttgggaggactactatgttgaccaactgatgaaggaggcctttccgtgct

SEQ ID NO: 39341 - DNA, 440 bp, Oryza sativa
  Clone ID: uC-osroM202014c01b1
ttgttcgctgctgagcgcggtgctgatggtgatattccacgtgatcagccccgacgacgcgtacgcctccatcgacctcccaatcctgggcctcctcttcgccaccatggtggtgggcagctacctccggaacgccgggatgttcaagcacctggggcgtctgctggcgtggaagagccagggcgggcgcgacctcatgtgccgcgtctgcgtcgtcaccgccctcgccagcgccctcttcaccaacgacacctgctgcgtcgtcctcaccgagttcgtcctcgagctcgccgccgagcgcaacctccccgccaagcccttcctactcgccctcgcctccagcgccaacatcggctccgtcgtcacccccatcggcaacccccagaacctggtcatcggcttcaatagcaagatcacctttcccaagttcctcatgggaa

SEQ ID NO: 39342 - DNA, 439 bp, Oryza sativa
  Clone ID: uC-osroM202014c04b1
tttgttccctccacttcggcctcttcttcctcctccatccccatcctccatcggatgcactagtagctggccttgtaccctacctagcttagctacccacccatgttcttctcctcgtctcctctcgctgtctgcctttgacttggagacctagctcgtcgatcgccggccatgcggatgcagtgcgacgtctgcgccgccgagccggccgcggtgctctgctgcgccaacgaggccgagctctgctccgcctgcgaccgccgtgtacaccgcgccaaccgcctcgccaggaagcaccgacgtctaccgctcgtccacccgttctccttctcctccggcgactgtggcgccgccggcgcgccgttgtgcgacgtgtgcagggagaagaggggcctcgtggtctgcgatgaggaccgcgccatcctgtgcgccgactgcg

SEQ ID NO: 39343 - DNA, 470 bp, Oryza sativa
  Clone ID: uC-osroM202014c05b1
ttcgtttcttgctccatccatctatccatccaaggagtgtggaacgccacacgtattttttttttatctatgctaatctgatcattagcagaggagagttttagcagtaggattggattaaattggagtagtttcatagtttgtgtgtagtgatcttaattagctttgattagacagacagtacagtagagtagaggatgttggctgtgttcagcggcgcggtggtggaggtgccggcggagctggtggccgccggcagccggacgccgtcgcccaagacgcgggcgtcggagctggtcggacgatttctcgccgtcgccgagccggccgtgtccctgcagcttggcgaccttggtcaccttgtcttcttccacgccaaccaattcctttcttcggccaagatcctttggatcaaaagatgacattttctgcctgtttgagggagtccttgacaatcttggcaggctgag

SEQ ID NO: 39344 - DNA, 107 bp, Oryza sativa
  Clone ID: uC-osroM202014c07b1
gccttgtttgccccacagcacatccccgagaaggggggagtcttctcagggcgagccgagcaccaccagccaacgtagggggcccaagggggcgaactataaagcag

SEQ ID NO: 39345 - DNA, 519 bp, Oryza sativa
  Clone ID: uC-osroM202014d01b1
tgttgtgctcgctcgaatcggatcgaaccctacgagcgctgtcggaggcggagctcatcgccggagtagcggcggcgcgcggcgccatggaccagagggagttccggcggatgctcgagctcttccccgtcgttcgatctcgcgactactgcgtaatttgcatcccctcccctgcctccctttctcataccctactctctcgtttccagcacgtgtagggcgggggcgaatcggcgtttcggcggcgatctaacagttcaggtgcttgagtcgggggagcaagaggggtctcgattttagggcatgggttggtcgatttgggtggctgatgatttgtggccttgggctgatgcgcgtggagactggattacgcattatgttgagataatctcactttggttatactgatccgtcgaattgcgtcatgaacctgtcttctagcctgagttgttgcgcagcacaagttgtatagatgatagtgcactggtaattgcctgagtgcatgcagttaaaatgaga

SEQ ID NO: 39346 - DNA, 465 bp, Oryza sativa
  Clone ID: uC-osroM202014d07b1
tttcttctcctccggctcttcttcagtatcgaatcctctcttctcctcgtgcccaccaccaccaccgtagcaatggcgggcaacgggccgatcaacaaggaggacccgctcaactggggcgcggcggcggccgagatggccggcagccacctcgacgaggtgaagcgcatggtggcgcagttccgcgagccgctggtcaagatccagggcgccaccctccgcgtcggccaggtggccgccgtcgcccaggccaaggacgccgccggcgtcgccgtcgagctcgacgaggaggcccgcccccgcgtcaaggccagcagcgagtggatcctcaactgcatcgcccacggcggcgacatctacggcgtcaccaccggctttggcggcacctaccaccgccgcaccaaagacggccccgccctccaagtcgagctcctcaggcatctcaacgcccgaattttcggcact

SEQ ID NO: 39347 - DNA, 148 bp, Oryza sativa
  Clone ID: uC-osroM202014d12b1
tgtatgctatcccatgatttgcctcaaccggttgatgctgatgtactttgcctttttgtgcaaacttccaaccgcaaactcatcctgttgtaagcgaattcggcttatgtttttttttcatgaataagaataaataagtttggtttgt

SEQ ID NO: 39348 - DNA, 468 bp, Oryza sativa
  Clone ID: uC-osroM202014e04b1
tttttctattgcacctcctgtgattactcatgactctggaacacctaagaatatatgaaccttaagacattctgtgtcgtctgacaaagataatgtaccttcggtattgactgcatcttctgaagaacagaatctccgtggatgcttcaatttagcagccattgtctcggttgtgagtcactttaggattgtaatagaacatttgaccaagtatggaattctctttaactgggcgacatttcaaacctacgttacgacgaaatatataattcattggaacagttttactctatatacaccctctaattgcctagacttagcaaaaattgtttattattagaggactggatttcgcagagaatttatattatactgatctattaaatataatacgatctctacttctgccttctatattcgtgtactttgcacaagcaggctttatgacgggtactgtcattcttttac

SEQ ID NO: 39349 - DNA, 437 bp, Oryza sativa
  Clone ID: uC-osroM202014e06b1
ctcccaaatggcatatgccgagctccacgttaacatcataatgacctaaatactgagtgacggaagacacgggaagaaatcggaaaaaggaaaaaaaaatctgagatataaaaattagtaattcgcaggaagcgaagcgcggatccgtttcctcacccaccgatcggcttcttccccccacgctagcagccatggcgtcgtcggcgctcatctgcgacaccgagcagtggaagggcctccaggcgcatgttggggagattcagaaaacgcacctgcgccatctgatgcatgatgttgagcgctgcaaggcaatgacagctgagtatgaaggcatatatctggattactcgaggcagcgtgcgactggcgaaaccatggagaagctgtttaaattggccgaagctgcaaagctcaaggagaagattgagaagatgttt

SEQ ID NO: 39350 - DNA, 561 bp, Oryza sativa
  Clone ID: uC-osroM202014f01b1
acccctcactattgtttaaggtgggcccccggtggggccccgccccgaattccggggggccccccacgcgcttttctagatcgggaccggccgcccttctctcgccgtttttttttaagaaagagtcgcctcaagaagatcagcctatcagacagatcaagtagggggagacatcacagcacgctgacgcgagagcacagcagcagcaatgccaatcagtaaacacttgtagtttggaatctatggagtgctaaaagaccacgaccacaacaactcaacataatttacagcaggatgacaccaaaaggccaaggcagtgatggcagctacggcactcattctgtaacccccctagcttcaccatggatctccaatctcgttgttattcccgcgttgctgcacaagaataaaaacgacagggtaaacaagaataggtgccacatacgtcaggataacctgcattgccctttaacaatcatgagtagatgagaacataatctgggttgcggaataggaaaatataacatggatgctgagatcaaggctgtcgcctttggagct

SEQ ID NO: 39351 - DNA, 111 bp, Oryza sativa
  Clone ID: uC-osroM202014f02b1
attatgggggattgtgctagggccctgctcttaagtccctatcacattggacgtttggacactattgataaatattaaacgtagactattaatcaaaaaaaacaaattatc

SEQ ID NO: 39352 - DNA, 334 bp, Oryza sativa
  Clone ID: uC-osroM202014f04b1
ttttcttaaagaaaccaattaagtacgccctcgggtactctgctgactgagcgggttgtattggaccgcttaccgttcaccttcatcaacctcactcaagtcaagtatctacatgaagattctttcacccccgcgcatctggcacctccgagagccccgcacgttcgggctcgtctcacgcagaaatcctgaacgggacctcttctatatccttcttcttaccagctccgatccgtttattgccgacaactagtgctacgatctgtggtacgcagtctacaagatttgattgccgatcaacgtctacccaacattgacctggctgacactggcc

SEQ ID NO: 39353 - DNA, 135 bp, Oryza sativa
  Clone ID: uC-osroM202014f05b1
tcgtttctcgtgtgattctggaactgtatccgccgtgagtgttcgtagcattcaacgcgcgaggcttggcctagatgataccgcctctatttccacccattggactcttgacagaagattttgtctctgcttctg

SEQ ID NO: 39354 - DNA, 392 bp, Oryza sativa
  Clone ID: uC-osroM202014f06b1
tttctcgcaagccaatgtctcgggttaccctgacactggtgggcaggttgtctacattttggaccaagtccgtgctatggagaatgagatgcttctgaggatcaagcagcaaggtctcaacattacaccacgcatccttattgtcaccaggttgctccctgatgcaactggcaccacctgcggtcagcgtcttgagaaggtccttggcaccgagcacacccacatcctacgtgtgcctttcagaactgaaaatggaattgttcgcaagtggatctcacgttttgaagtctggccgtacctggaaacattcactgatgatgtcgcgcacgaaattgctggagagctccaggccaatcctgacttgatcatcggaaactacagtgacggaaacc

SEQ ID NO: 39355 - DNA, 527 bp, Oryza sativa
  Clone ID: uC-osroM202014f09b1
tttcattcccaactcatcgatccatcagtagctagctagctagctagctgcattgtccggcgagagagatagctgctgcagggggcggccatggggaggggcaagatcgagatcaagcggatcgagaacgcgaccaacaggcaggtgacctactcgaagcgccgcacggggatcatgaagaaggccagggagctcaccgtgctctgcgacgcccaggtcgccatcatcatgttctcctccaccggcaagtaccacgagttctgcagcccttccaccgacatcaaggggatctttgaccgctaccagcaagccatcggcaccagcctttggatcgagcagtatgagaatatgcagcgcacgctgagccatctcaaggacatcaaccgcaacctgcgcaccgagatcaggcaaaggatgggagaagatctggacgggctggagttcgacgagctgcgcggtcttgagcaaaatgtcgattgccgcctcaggaggttcgcacaagaagtatatgtgatcagacaagactg

SEQ ID NO: 39356 - DNA, 455 bp, Oryza sativa
  Clone ID: uC-osroM202014f10b1
tgtcgacgtgcagtaaatgaaatacgtcatcttgttctcggttgttctggcagcagtgggtgtatggtttcagctccaaacaaacaataaacaccctagtgaatatttgaaagaagattttagtactcctcctccatggtttctcttgaaagcagtgcagttggtggactctatcaccaagaaattctcaattgttcctcctctattccaggtgttagatgatgtcctcattttcgaaaaatcccaactggtgcacacaagtgccattttggctatcccagatttgattggtgatcaagtgttatccaatattgatctggctgatcgtttagctccggctagtgctgacaagaagaaggtacaaatgaacttgtgcagattcttgagagccctcgccgcttatggttactttgaagaggtttcctcggatcgttctagatttgactattgtgatt

SEQ ID NO: 39357 - DNA, 283 bp, Oryza sativa
  Clone ID: uC-osroM202014f12b1
gggactcaatgaatcaatcaggttgccgacatatggttcactcaacagttccgcttgcccaggtcgatacagagtaaatttcaccgcctgctacaaacaatgtcatggacatcaatgtccattctttttttgctttgtttccaagtttacatcttattccaagacaacagaaagagaccgtcaaaattgcagcctttcctagctagatactatcggaggaggattttcaacaaatcagtgcttggcgttgacaagagccatgtgggcaatcagatccaacaca

SEQ ID NO: 39358 - DNA, 135 bp, Oryza sativa
  Clone ID: uC-osroM202014g02b1
agcgcccggtttttgtatactgacgcctccatggacattgacgtttactgtttgctccttgacgccaagtagaaaaaggttcgtgcattatgcattgttcatttgggcagtgtgaatgacggcattggccctgcg

SEQ ID NO: 39359 - DNA, 488 bp, Oryza sativa
  Clone ID: uC-osroM202014g03b1
tacttcttcaaccttgaccgggttctcgggaagccaccgtatgtgccgaggccggcgagccacgcggcggcgagcaagcatgagcggcagcagcaggacggggagctggagccgctcaacgtcaggcacggcctgctcaacgcgctcaacctgtccttcttcgtgcccatgcccgggatgcgggcccgcaccgtcgtcgactagcacatgtcgcctcgcagcctcatgcacatgcagcagctcggcgtcgacccctcggcgccggtggacgttggccggagcatggcgtacgggaactgcgccgtctcgagcccctccttgtgagacgacgagattgacgtcttcttccaagagcccttaattatgtaaatttttgtagaagcagaccaacaattttttcgttagtcaggggtgtcagcgggaaaaaagattttcccttgccatttgacgtatgtatgtacagcaccataaaaactattatacttggc

SEQ ID NO: 39360 - DNA, 391 bp, Oryza sativa
  Clone ID: uC-osroM202014g05b1
tcggtttcttcgttcgtgcgagcccactggtgctgctgctgctgccgctcgccgccgccgccggctcgctcccgccggtgccgctctcgacggtcgtcgctgcgggtggtgggcgcggacggtccgcgcgtgcagctggcgtgcgcgaactgggcgccgcacctggagcccgtggccgcggtcggcctgtcgcgccgcggcgtgtgggacatcaccgcgcgcgtggccgcgatggggtccaactgcgtcaggctaacctggccgacctacctcgccaccaacgccacgctggcgagcctgccgctgcggtggccgctggagcgctttggcatgcgggagtccgtcgccggcgtgcgggtcaacaaccccggactgcttgacctgcccctca

SEQ ID NO: 39361 - DNA, 393 bp, Oryza sativa
  Clone ID: uC-osroM202014g10b1
ttttcctcccctttctctctccttcccgatctgtctctctctctctctcctcgagctctcgccgcacgctcccaaaagcggcgccgcgccgagctcgagctcgagctcgcggcgggcgacgagctccggcgagcgcgcgcgcgcacgctgaccagcgggggtttccccgtccgagctcgcgcgggcgtcgtctcgtcgggcccccttttcacctttctatcggtcattgaggggtgttctctctccccccaggccaccgcttcgcctggccgctcgggcgctcgccgcggattttcctggcccgccgagtggcgggatcgcggccaaccgcggaatggcgcagagcaactgggaagcggataagatgcctgatgcgtatatctatgactattt

SEQ ID NO: 39362 - DNA, 381 bp, Oryza sativa
  Clone ID: uC-osroM202014h03b1
tcctaattcccccaaattttcgtctcccctttgggttccccgtgaagaagagagcggcatccatggcgcccaaggcggagaagaagccggcggcgaagaagcccgcagaggaggagcccgcggcggagaatgccgagaaggccccggcggggaagaagcccaaggcggacaagcgtctccccgccggcaaggcctagaagagcagcggcgaggggtagaaggctctgcggaagaaggcgaagaagagcgtcgtgacctacaagatctacatattcaaggcgctcatgcaggtccaccccgacatctggatatactccaaagccatgtccattatgaacttcttcatgaacgacatcttagagaagctcgccggggagttcg

SEQ ID NO: 39363 - DNA, 438 bp, Oryza sativa
  Clone ID: uC-osroM202014h04b1
tgtgatacaaacagagagcaattctcttctcctacctagctacctagtgcagtgcagtgcagtgcatcgaaggtttacttggcgacttccatgggttgcctgttgatgctctgcttggtttctcccctcctcctcgccacctctgtccacggcaacccgtggtatgggtatgggtatggcttgttcccgcagttctacgaccactcgtgccccaaggcgaaggagatcgtgcagtccatcgtagcacaggcggtggccagggagaccaggatggcggcatccttggtcaggctgcattttcatgactgctttgtcaaggggtgtgacgcgtctgtgctcctggacaacagcaccaccattattcagtgagaaagggtcaaaccccttacatgaactccctcaggggtttcgaggtcgtcgacaagatcaaggccgccc

SEQ ID NO: 39364 - DNA, 514 bp, Oryza sativa
  Clone ID: uC-osroM202014h06b1
tgttggtttttttggcacctcccctcatgtataggagagagctctatagtaatgacaacttaactcaacagtgtacataattaagctactaacattagcagatagcaatacaccacaaaacaaactaaatcaaacgccacaccctatgtccccaacaatggaccattcattcctttgtagtctgccagaaaaaataaagaagaaaaggcgccaggttcaacaagaccatctccaaaaacacggtatggacaagtaaacccccttgcttagtgcctctactatatattctcagagagcaaagaataccaccggtgtggatctctaaagcctacataactgccatcctggaaagtgccccagtcaatgctttatatagggtccatctttggtaatcacgacttcagaaagctcaagctttgtactcacggacatgcatccacttgggtgatgaccatttgtttcctttgatgacaggacaacccccatgcaaacttaaagggtctagagtggcatc

SEQ ID NO: 39365 - DNA, 515 bp, Oryza sativa
  Clone ID: uC-osroM202014h08b1
ttttcattttatatctaagggaagtagatgatgctgacaagctggttgcagctatccaagcaaagaagggtggaaaggcagttattgtaggaggaggttacattggtctagaacttagtgctgcattgaagatcaatgattttgatgtcacgatggtgtttcctgaaccttggtgcatgcctcgtctcttcactgctgatatcgcggctttctatgagagttactacactaacaaaggagttaagatcgtgaagggtacagtagctgttggttttgatgctgatgctaatggtgatgtcacagcagttaacctgaagaatggcagtgtgcttgaagctgatattgctgttgttggtgttgggggcagaccgctgactactctctttaaaggtcaagttgctgaagagaaaggtggaattaagaccgatgctttctttgaaacatgtgttcctggagtctatgctgtccgtgatgtggccaccttccccatgaagatgtacaatgagttgaggaga

SEQ ID NO: 39366 - DNA, 416 bp, Oryza sativa
  Clone ID: uC-osroM202014h10b1
ttcttcttttggtgaagatgaccaccgtgtttgtcttgctgctggtatcattgaggccagtgggcttgttgtcgccgttgatgatgatggctgcttcattgaaaagatatctgagttcagtgggcgatatgtcaaagaggctgacagggatatcatcaactctgttaaggattaaggaagacttgtcagtaaagggagcattgaacactcttatccattttgctggcgctcgggcactcctcttatttaccgggctgtcccaagctggtttgcgaaggttgaaaagattagggaccagttgctggaatgtaacaagcagacctattgggttccagattatgtttaggaaaagcggttccataattggcttgaaagtgctagggattgggctgttagcagaagtagattcttgggga

SEQ ID NO: 39367 - DNA, 525 bp, Oryza sativa
  Clone ID: uC-osroM202014h11b1
gtccgcctaaagaaatatactcacacacttcttctgcttccctccccttgtttccgctccacttcccttccaagcaagaaaaccgaggcttcagcttagctaggaccgaccgatccgatgtgcggcggtgcaatcatctacgactacatcccggcgcgccgccggttgtgcgcctccgacttctggcccgacgccgacgactccgacccccacacccccgctcccgagaaaccgccgcgcgcgatgagggagcggaagaaccagtaccgcgggatcaggcagcggccgtgggggaagtgggcggcggagatccgcgacccggtgaagggggtgcgcgtctggctcggcacctacccgaccgccgaggccgccgcgcgggcctacgaccgcgccgcgcgccgcatcaggggcgccaaggcgaaggtcaacttccccaacgacttcggcgccgcccccgcgccggccgcggcggcggcgaaggccgttcctcgcgtcgcgcccacgccggccgtgctcccgccgccc

SEQ ID NO: 39368 - DNA, 495 bp, Oryza sativa
  Clone ID: uC-osroM202014h12b1
tttggcgccacgtttaaagggcggagtcgctgtaattagagaagaggatttaaagagagagaaggccattctctcttgattgcttggagaggaagaagaacaagagccgccaccgccgccgttaggttttttatttattttttttctcgatctgatccgaggaggagcgaagcgaagaagggcaagatgcattcgacgaatctgctgctggaggagcccatcaggatggcatccatcctggagccatccaagcccagcttcttcccggcgatgaccaagatcgtggggacgctggggccaaagtcgcgctccgtcgacaccatctcctcctgcctcaaggccggcatgtcggtggcccgatttgatttctcgtggggagacgccgagtaccaccaggaaacccttgagaacctcaaggtcgccatcaagtccaccaagaagctctgcgcggtcatgcttgacacggtctgcccagagttgcaggtggtgaacaag

SEQ ID NO: 39369 - DNA, 408 bp, Oryza sativa
  Clone ID: uC-osroM202016a01a1
tttttggttttttaaatggaaagggatttatagcatccatcaaatacattcatggagcaagtcctctaaatgggtaacacaagtatacggaagtccaacaccacactttcagatcattccatatcgcctttcaattccctaaaccaggagcaacttccaccgaattaactaaagactatggaccctaaaatgtaggaagagaaagtgcatgtccatcatatatgaagagaaatggcacgcacaagcctaaagaggaagtgcatctgtcactgaatttttacaatctaacaatctatgagcgcactcaggtggtcaaccacgcctggatcaccagggcctcttgggtcaccaagttcatccagctggagtgaggcaatattgcgcagaatcctgggcattatcttaccg

SEQ ID NO: 39370 - DNA, 422 bp, Oryza sativa
  Clone ID: uC-osroM202016a02a1
gcgcagcgcacgcatgctcttgtactctattttgcgcgccctctttttttttttttgggtaaccaattcaagggaaatcctactttgcattattattcacatttcattcaatttttaggaaatgtttttacacatggatgtacagggacaaaccgtgtacagcaatgctgggcgtgccattgcacagttaagtgagccttaccttgctcgcaacatatgtgtcatgatgaatcccaaatgacattttaccgctaggctctttggaggatgtttgtggggaacacttggcctcaactgataaatttttgaggactcctcggcgtggatcacctaagacatcattggaaacactgattgcacatttggggttgtcaacacatgcctctttcaccaaatccagagtgctctatgcatgggaattt

SEQ ID NO: 39371 - DNA, 553 bp, Oryza sativa
  Clone ID: uC-osroM202016a03a1
tttgcggaaatctttacttgtattgtgggctcttttgtccttggcttttagtctgcagtttggttttacattacagtacactggtctatgtgtgtataacagcaatgtctatgtctgtcacatgaaggctcaatcagaggatattgatactgagatcgctgctgctggtaatgtttctgagaccattaatacagtcattggttctattagtgttgccgaaattacttttaatgttggaactactcctaccttcactggtaatgctaccttcggtattcaccaaactcatactgatcattacattgactatgctggttctcttactcctttctatactgaagctagttctactttgtactgttttggtggtgctggtaatatcgtagatggtcaaggtacctgggctggtgcttctggtgcatatcggttgagagggtgtgtatacagcgctaggcttgctgtcctttatattgcaacctttcgtattttttggacctgttaccccaccttcccccctggtatttatttctaaagaaataaattgacttagttg

SEQ ID NO: 39372 - DNA, 158 bp, Oryza sativa
  Clone ID: uC-osroM202016a04a1
ttttttggttattaaaatttttttttcatttttattttttattaaatattttttttttgaggccaaaaaaaattgtaaaaaaaaggaaccaacatttattcaaattaggggacatgatttttcacataaaacggacaaaaccaaagctgcactacatt

SEQ ID NO: 39373 - DNA, 512 bp, Oryza sativa
  Clone ID: uC-osroM202016a05a1
ggggatctctacgatgatggattccgtggttgtcatcagagatgatacgcttgcagcatccaccaaggcagttctgatcacttttagtgggtcaatgataccagccttcaccatgtccacatattcacctttagccgcatcatagccaaggtcggtgttatcttgttccaaaagcttaccgacaacaacagccccttctacacctgcgttggaagcaatagtgtgcaccggtgtcttcaaagcattctgaatgatttgtacaccaatcttttgatcaaagttagcagtcggcaatttatccagctcctttgatgcataaagaagtgcaacacctccacctggtacaataccctcttccacagcagctttagtggcattcaatgcatctgtcactctatccttcttctcaccaacttcaggttcactggctcctccgatctttagaacagcaacaccttcggagagctttgccaaccgctcctgtagctttttcttgtcataatcagaagtgc

SEQ ID NO: 39374 - DNA, 479 bp, Oryza sativa
  Clone ID: uC-osroM202016a05b1
tctcttcctgcctagccccaggtcgctgctcggctccgccatgtaccgcgcggccgtcagcctcgcctccaaggctcggcaagccgggagcagcgctcgccaggttggaagcaggcttgccttgagcaggaactatgctgccaaggatatcaagtttggagttgaggcccgtgctttgatgctgaggggtgttgaggagttggcagatgcagtcaaagtgacaatgggtcctaagggacgcaatgcgggtattgagcagagctatggttcaccgaaagtcacaaaggacggtgtgactgttgccaagagcatcgagttcaaggatagagtcaagaatgttggtgcaagccttgtcaagcaggttgctaatgcgaccaatgatactgctggagatggtaccacttgtgctactgtattgactaaagcaatatttactgaggggtgcaagtcatgtgctgctggcatgaatgcaatggatt

SEQ ID NO: 39375 - DNA, 358 bp, Oryza sativa
  Clone ID: uC-osroM202016a06a1
tttttgggtactaaacgcgacgatgctgtacaatgtaaagagttttgacaggttttgtttaatttcatgaattccaggggcaatgtacccagcttgatgcaacttcattgccactttccaagccagatctctcccactgtcagtgagtgaacccacgtacaggtttaagctacgctatcttacaagtgaagttattacaagcatcacggcgacgatgaaaaatcgctcgtgcctgcttcagagagtgtagtttcctggagttgggtattgagcaaggaggagaggaggtcccgctgcaggtacaggggtaaaattgaaggggtgattgtatgcacaagctggcccaaatttgcagacc

SEQ ID NO: 39376 - DNA, 298 bp, Oryza sativa
  Clone ID: uC-osroM202016a07a1
tttttgtatacaacgttgttctggtttccctaacataatgcatgtcagaagcgtctgagaatacataaaattggtactcatttcacaagagtagcttatgaattatattttctggtaaaagacaaaacaaacaacaagaaaaagaacatatcactacaccttgactacataaagcaagcaaccccaaatgtaggttttgatctactcaaggcaaaccacctcttccaagtaaatacaagtcgttgccaaaagattcagtatactcatccagtgttccagtcctgccagtgaagaaaag

SEQ ID NO: 39377 - DNA, 392 bp, Oryza sativa
  Clone ID: uC-osroM202016a08a1
ttggggtatttgcgagttgggtgctatgcacatggggggaaccacattaacataccaagggatacatacatgtagcaaggttttgatgggctggcacatgaaggcttaatcagaggttattgttactgagatcgactgatgaaggaaatgtctgtgagaccaataatacaatcattggttctattaatgaaggccaaattacttctaatgttggaactactgttaccttcactgggaatgctaccgttcggatttaccaaactcatactgatcattacactgactatgctgggtctcttactcctttctatactgaagctaggtctacttcgtactggtttgggggcgctggttttattcaagatggtcaaggtacctgggccggtgctttt

SEQ ID NO: 39378 - DNA, 481 bp, Oryza sativa
  Clone ID: uC-osroM202016a08b1
tttcgttacattggaaacagccaagctactaagggatgattacttggcacagattgcatttaccccatatgacaagttctgtccattctacaagtctgtttggatgatgcgcaacattattcatttcaatacattagcaaatcaggctgtggagcgtgcagctaatgctgatggacaaaaaataacatacagtgtcataaagcatcgtatgggtgatctattttatcgcctagtatctcaaaagtttgaggaccctgcagagggtgaagatgtcctagtcgcaaaattccagaaattgtatgatgacctcacaaccggattccgcaacctagaagatgaagctaggtgaagtgctgtaaattgaggatcacattcgtgtcaacaataaaatatcaccagatattcgaagcgagttggggctatttattttgcttcgcgtgaggttgttgatgtgaattacgtttcagaatcattatttttt

SEQ ID NO: 39379 - DNA, 445 bp, Oryza sativa
  Clone ID: uC-osroM202016a09a1
ttttggtattgtcaagaaacctcgacaaccgattccataaaattcaatcaagtacaagcccacatatatagtatacagtacatacatgaaagaatgacaaaatatctgtacgccatgcaaaaacgtacaatcaacaaaatagcattaaacacacactgacactcatcgtgcacacatggcgaagcgagctacgtttaggccttgggtggtggcgcgaggaatggcattggaacgttggggacggcggccatcggcggcagcgccacctttggcaacgccggcacgacggcggggggaacgacgacagtgttcggcggcacggggggcaccgcgggcattggcggcagagtcaccgccggcacggacggcacggcgggcatcggcagcatggtcaccggcggcacggtcgggatggcgggcataggcggcatgtcacctttggcac

SEQ ID NO: 39380 - DNA, 356 bp, Oryza sativa
  unsure (1)..(356): unsure at all n locations
  Clone ID: uC-osroM202016a09b1
gttaattagaacactgaatatattagctgtgctaagtgtagctagctcagtgggcaaagcaagcaatatttcaatggcttccagctcgaacttgctcgcgatggccattgccgtggctgccgtgctcctagcgggcaacggcaacaccggccacgcagcgcggcgcctcgccgacacgaccgaggcgccggcgccggcgccggctgccgccattcctgctgttccggccatgccgaaaccgacgatccccaccatcgtccccgcggtcacgttaccgccgatcccgggccgtgccaataggtgacattgcacggcgatgccccgccatccngacccgtgccggcggtgaccatgct

SEQ ID NO: 39381 - DNA, 441 bp, Oryza sativa
  Clone ID: uC-osroM202016a10a1
ggggcgggggcgtgggaggccgaggcgtcgggggtgttccagatcaacacggcggtgtcgacgttccagcggctggtcaacacgctcggcacgcccaaggacacccccgacctccgcgagaggatacacaagacacgtcaacacataacacaactggtgaaggacacatcggtgaagcttaaacaagctagcgaggctgatcatcgtgtcgaagtcagcgccagcaaaaagattgctgatgcgaagctagcaaaggatttccaagcagttctgaaagaatttcagaaagctcaacggttagcggtagaaagagaagctgcttatgcacccttcatttctcaagcgggcttgccacaaagctataactcgagcgaggtgaacaatggtgctgataagttggctgagcaacgcacggcgcttttagaatcaagaagcaagaat

SEQ ID NO: 39382 - DNA, 444 bp, Oryza sativa
  Clone ID: uC-osroM202016a10b1
actgaccaacttaagcaactattataatgcaaagaccaaactcctcgttcttacaacactcactcaacgatacatcacaggatataaacaggggcgagcgagcaaggcaggaggcactagagtgacaccaagcgattatacttaattacttatatataaaccatgcattccagacacaccattcatcatcacatacaccaccatggcacaagaccagaacgcaaccccctcctccaggcaggagatcaggatacattcccgacttcacagcaaaattaaatcaggaaggaatacttcgctctaagctcaaccagatctaggagtcccatgttcttccaggctgctgactaggctgcgaggacgattatcactatgagcaggaccaccccgaatataaccagcaacaagcatatcagcgaagagttcgacttctgagttttagca

SEQ ID NO: 39383 - DNA, 263 bp, Oryza sativa
  Clone ID: uC-osroM202016a11a1
tcgcgatctaaactggtcctctcctcctccggcgacgcgatcgagaagcggcgccggattttgccgccggcgacgcgcggctgagggggcggcgggaagggggtgggggtggggaggagcgattaccatagccacaattttaacacttgagcagaattgaacccagcgacagtgtgtacgtgcacaaactcttacggggatgaacatcgtgtatcacaccgaccgagggaagcaatagtgtgcaccggtgtcttaaaagcatt

SEQ ID NO: 39384 - DNA, 348 bp, Oryza sativa
  Clone ID: uC-osroM202016a12a1
ttttggtttttttttttcaaacaaccgatctgcaactttgcagatttgaagattcatctaaccaaacaagaacatgatggagtattttacatcagaaaccaaaagcacaagcaaaagagagtccaatagtaacacaacaccctatctaaagcaaagaacattactacagctggaaaaattactacttcctcccttctataatactatgaaagatttttgagggatggcgaatctggacacacagaatattattacagctgcagggggcaacaaaaacaccctgctaggctgctttgtcggcgccccggggacacacagctagctacatgacggagcaggcgttggggt

SEQ ID NO: 39385 - DNA, 420 bp, Oryza sativa
  Clone ID: uC-osroM202016a12b1
ttctcgatttcagctcaggaagcctctgctactttgcttggcctgtacagtaatacagataaagacctgcagttctttggtctctttagtgaggactgaggagtttggttggagattgttgaggagatgggcatcgtcgacgttgtctccgagttctgctccgtgccgaggactcgccgacacctcaagaagaggaaacaattccagacagtggagatgaaggtgcggatagactgcgaaggctgtgaaaggaagatcaagaaggcccttgaggacatgaaaggggtgagctcggtggaagtgacggcgaagcagaacaaggtgacggtgacggggtacgtggacgccgggaaggtgatgcggcgcgtggcgtacaagaccgtgaagcgtgtggagccatggtcatacgtgccgtacgac

SEQ ID NO: 39386 - DNA, 352 bp, Oryza sativa
  Clone ID: uC-osroM202016b01a1
gggcgcccttttttttttttttgtggaacttaataatcagtgcgatatttcaccgagggtaatgtatggtaggaaaatcgccagacataacagagccggccagactcaactgaaactcaaccctatgatgggaaactgtttgcgattaacgcctccgcctatgacaatgtttggagataaacgcttccaccaaaaaacgaatgtcggggagtgttctcccctacaagaattattattggtttcaatgttaaaaaggcaaaattcaccagatcccgctagggcaggaccaggaataaacacttggtcgtcatcattttctgccaatttaggcaccggccgggccgtacttctt

SEQ ID NO: 39387 - DNA, 501 bp, Oryza sativa
  Clone ID: uC-osroM202016b01b1
tacgtctctcgctctctcctctctctccctcttccgccgccgcgcttggggaaggaaggagaaagcaagccatcggcccccgcctccgcctccgaagggacattgttgctagttggtgatggctgagcaggctaatcaaccgactgtccttcagaagttcggtggccagttccaccttggctccagcttttctgaaggtgtacgggctcgcaacatctgcccatctgtctcatcctatgacaggcgctttaccacaaggagctacatgacccagggccttgtcaatggtggcatcaacgtcccaatgatgtcgtcctctccaatttttgctaatgctccagctgagaaaggtggcaaaaacttcatgattgatttcctcatgggtggagtgtcagccgcagtttcaaagactgctgctgcttccgatgagcgtgtgaagctgcttatccagaaccaggatgaaatgatcaagctggtaggctctcagagccatacaagggt

SEQ ID NO: 39388 - DNA, 423 bp, Oryza sativa
  Clone ID: uC-osroM202016b02a1
ggggggagtagcaagcaatgcacagcaaaatgggaagatatgaacaatcatggccaacgaggggctaacaacagtttagcacagtacaaaaagtaaacacacataacaggaatatgcaatgcaacggaaccggagtatactgacaaaccaatcattaaccagagaactacttattaaccagctactaatagtcttctccatcgtcgttctcgtcgtctgcaccctcggcgccgacttcctcatagtccttctcaagggcagccaagtcctcacgggcttctgagaattcaccttcttccattccctcaccaacgtaccagtgcacaaacgcacgcttagcatacatcaagtcgaacttgtggtcgatgcgcgagaaaacctcaacaacaacagtgttgttgctgatcatgcacactgcacgct

SEQ ID NO: 39389 - DNA, 468 bp, Oryza sativa
  Clone ID: uC-osroM202016b03a1
ggcaaggacgagcaggagcaggcccctcctcctccgcgcgtcgtgcgcctacgcgctccgggaggggcagtcgcagcggttccaccgcctgccctgcggcctcgacctcgaggttatcgcccagcagccgcctgccccggccacgggcggtggcggcgccgccgcgaggccgccgctggtgttcgtgcacgggagcttccacgcggcgtggtgctgggcggagcactggctccccttcttctccagcgccgggttcccctgctacgcgctcagcctccgcgcccagggtgaaagtagcgttccgccagaaaaagtggctggcacacttgagacgcatactggcgatattgctgatttcatccggaaggaggtttccctgccacctgtattgattggacattcatttggaggcttgattgtgcagcaatatatatcttgtttgggagaacttctgcatccaaagcttgc

SEQ ID NO: 39390 - DNA, 500 bp, Oryza sativa
  Clone ID: uC-osroM202016b03b1
ggctagcaattcatgcagtattgttcactaagcatgcttaaatttattcaatcaaataataatacaaaaaaaactgaagagcactaactaaactgcctatcaaccaaagattctacatttgaaaatgaacaagggctacaaaatgtagaaacaggtcttaaaaaatacaaaagatttatcttggtgtaagtttctccagccatgacaagataatcccagctcctttatcccacgagcaatcaagcatcatatcatgggctatcccttcgatgcagactggttgcacattataaaatcttgcagtttctgaaagcccttcagcatcaacaatgaagtcactgctggcgcccacaacgaggatgtttactgtattatttggcacagaagctacaggcaatgatgcattgagcttccttaggtcaaatagtggtaactttgagctgtccttcattagcccttggtacctttggaccaggtcattatccatctctggcgagaaa

SEQ ID NO: 39391 - DNA, 459 bp, Oryza sativa
  Clone ID: uC-osroM202016b04a1
cactatttagagcatccggcgatgccgcgtacgttgcttgatcctcttttcgggcgccctttttttttttttgtgttttaacagataacttcgacatgaaattgtcaaatgacaggtgtatgaaacacaggtaaaatgccgtaccctctaggtacaaaccattgagacaaaaggaaaagaaaagaaaagaaaaaagaacatcacatccctgggtacgcatacttaactttacatagagctagaacactcaggaacaatggtgcaggcgttgacactgatcatgcaacaacatggacatgagatacccaatggatagctgcagagcaaattttctcttttgctttctacctacatttgcagccaaacggtgtttctgtcttcatgatgaataaaaggcacatttgcatgatcaatcacgaggaatggacgccaggaataggcgcgtagacgatgagatcg

SEQ ID NO: 39392 - DNA, 504 bp, Oryza sativa
  unsure (1)..(504): unsure at all n locations
  Clone ID: uC-osroM202016b04b1
ttaactttgttggtgcgaattttgaccagcgtcgggttcactcaccaaatcaccaacattctccagatttaaggaaagaaggcaccacaacatcaaaatatgaagctgaggttagcaggactaattctggcagtggctctggtcgacgagctggcttggacagcatggatgtgacaggttcacagatgggtagtcctgctcacgcaggaaggaagagggaatcatcgcggagtactgataggcagcgtgcagtcgcagaggccaaaacatggggggagaattcaagagaaagaaagtggccaaatgctcgtggcagctttgatagtacaaatgagtaaacctctgaagcagaaggttcagttaagtcgtcattctaggggaaaaaaaaagatgaatcacttgcagaacccaactgggtcgaattaggtacatggggcattttcgctccatctcggctctgcggtctatgtgaatagagcttctcttnttctttttctgtcctgg

SEQ ID NO: 39393 - DNA, 381 bp, Oryza sativa
  Clone ID: uC-osroM202016b05a1
tttttgggtactaaacgcgacgatgctttacactgtaaacagttttgacaggatttgcttaatttcatgaattccagcggcaatgaacccaacttgatgcaacttaattgccactttccaagccagatctttaccactgtcagtgagtgaacccacgtacaggtttcatctacgctatcttacacgtgaagaaattacaagcatcacggcgaccacgaaaaatcgatcgtgcctgcttgaaagagtgacgtttcctggaattgggtctcgaacatgtaggagacgaggtcccggtgcaggtacaggcctgcaattgaaggggtgattagaatgcgcaagcttgcccaaatttgcaaaccccatggcgaccatagtatgtgc

SEQ ID NO: 39394 - DNA, 302 bp, Oryza sativa
  Clone ID: uC-osroM202016b06a1
gggaaaaagcctcacccccttaccataaaaatcccgggaccaaaatgtattctcattatccgcgggcaatgaccatatgatgatgcgggggctacaagacccgacgcttcctggatctgccccacacgatgggcagaacaaaatgggaggaataatggcccataaacagttttcaggggacaattaccacagctgtttgcatttaagcagcaggcttgaattcagggctggggggtttgatcagcccatggcattcttgtgggtccagacgggggatgtgcccttatactttggacgaaccg

SEQ ID NO: 39395 - DNA, 405 bp, Oryza sativa
  Clone ID: uC-osroM202016b07a1
tttgtgggatactaaataaaagggaactatcattcacggccaaggtatacagtccaacatatcacctgaacttcctaaactcaaatgaggcaaggaagcattggcttgacattgggatttatatggtctatgctgcctctttttgattgaacgaccaaactgactgtacatcaggatttgtagcaaaaaagccaccaccaacatgtgcccctgttggtgagctaaacttactagctgcccgaggtccatgcaccaccaatggctagttgaaccactaaggacctgtgggactaatggtgtgcaaattggctgaccagcttgccgagccaaaatccaaagcgtagcgtatagcattctctgatacatcatgtgacacgaacaaacttcttgtatcaagaggcattt

SEQ ID NO: 39396 - DNA, 391 bp, Oryza sativa
  Clone ID: uC-osroM202016b08a1
acccgtcacgaaagctggaatcctatttaggcggccgcccttggttctatctggggcaggcctatctttctttgctcatctttctcctacgttctttaaaaggaacagacgcaaagggctaaccacatgctttatgggcataacccacagtttatcgttaaacggacatccaacccaaacacggggggggaaaatgccgaaccaatgcttaaaaaaaccccggctcataaaagatttcacacgccgtggggccaaccttagccctggccgcggaacccttgcaggggcccgtctccgaggtacgcacgaaggcatcgaacccaggaccaacatccgaaaacggcagaatttgtattcccctcactagcgacgcatactgaaacggacgctt

SEQ ID NO: 39397 - DNA, 514 bp, Oryza sativa
  Clone ID: uC-osroM202016b10a1
tttttgtattaaaccactatttttattcatgccaaacaccagcactagtccagtgacaaccaaacgacaatcctacactccaaaagtttacatttaggttctcaaatagtggtacatagctttgagagttgaaaccgtcagatactgacatagtttatgaggtgcccctggagttggcaaaaacttcacgaagattgtcgcagctctggacgcacaaagtctgcatcagcaggcactgaaatgtcaacggtgggcctcaactgagcacagacttcaatggcactatggacgggatcggagaagaaattgctgatgaggtcttgattaactggagcattcttgtcaacagtcacaaaagcttgttgggtcaagatgtagtcgaagcgtggcgcccatttccttgatcccaaccgggctgttgtggagcagttatcaaccatgaaggccaccccacgagcgtgcatgaatgggttcagggaatccacagactcgatcaaactctcgttgatgatct

SEQ ID NO: 39398 - DNA, 417 bp, Oryza sativa
  Clone ID: uC-osroM202016b11a1
ttttggggaacggcaacggcgtgattaattattattatccacccaaaattcgatatctcaaaatgttcgcgacaaaatttccctgtacacacaacctgatcgatctcctcaccctccttccaaactaaccaactcgcaaagtatgcagtgacaatatactgtaaatatcagacaagaaagaaacaagaagaagaaaaaaaagaagacgatatttcgaagatgacgcagtgatgagcagctagctcgccggcattgcagcttagattagacgaggctgcaagccttgttgagggagacgggcttgccgagcttggcgacgtcgagcctgacgctgcactgcacgttggtcaggaacttgggcttcaccagcttgcccagcacgaacgcccgcgacctgaaccgcaccgccagctgcag

SEQ ID NO: 39399 - DNA, 480 bp, Oryza sativa
  Clone ID: uC-osroM202016b12a1
tttttgttgatgaaaatccacgtccatatatattgatcataaaggaggttgtcatgacgtcatgcatttattcgacatggcagtaaccaacatatatccacagtcgtcgtcgtctctttccacattcaacgtacggtacacgtactgacgtacgcgtccatggcgcgcacaattgtgtgtctagagcacgatgctctcggccgcctcgacgacggtctccacggcggcggaccacgggagctcctcgtcggcggcggcggcgccggggttgcggacggagcagtttgcccggatctgtccctgcgagccggtgagcacctggatctggcccatcttgacgacggagaagacgaactggtggaagaacgccgactggtcgacggcgaacttggtgacgagcggcttggtggtggcgttgaccaagaggtcctggtcggaggtgaagaggccctgcggttgagcaggtcgacgtagtacttg

SEQ ID NO: 39400 - DNA, 472 bp, Oryza sativa
  Clone ID: uC-osroM202016b12b1
ttctcgtttcgatctccattgaaatcaaggcaccttggtaatttctagtaccatattaagctaagaacagtagtgtacatggcttctcgtagaagtgcagcagctagtccggccatggcagcagcagctgcggtagtagctgtatctgtatacttgctggtgtgcagtgctccggcggcggcggtggcgaagaagccgtcgtacccgccggtggcgaaggggctatcgttcgaccactacaagaagagttgcccgcaggcggaggccatcgtgttcagcttcctgcgcgacgccatcggcaaggacgtcggcctcgccgcggtgctgatccggctccacttccacgactgcttcgtacagggctgcgacgcctccatccttctcaccaagacgcccggcgggcccgacggcgagcagcaggcgatacccaacgagtcgctgcggccggcggcgttcaaggccgtcaacgaca

SEQ ID NO: 39401 - DNA, 309 bp, Oryza sativa
  Clone ID: uC-osroM202016c01a1
ttttggggacttcatgcatctttatctcccatatcggattaaagactgacaactgtacctcatcgccaacgtcattatacatgcatacgcctgtgaaaacgactggttaatggtcacccttaatttttttgacaaatgtttagaggtaagggcagatctcaatcagctaacccaaaaaactaaaggccggtcagtttacccaactgcattatatatcgacatatggagctatttaatagacagggggttgtcgacaaatcctagaattgtgatgggggctgccatataatatataaccgcttcttcaat

SEQ ID NO: 39402 - DNA, 392 bp, Oryza sativa
  Clone ID: uC-osroM202016c02a1
gtaacaatactgaactgatgatatattcatcattgtaaaaatcaataaacatgttccttcagcatgatggcatacaaatttgcaatggtaacttgttgtggcattgaataagacgattaaaattataatcttatttttttcccaacgatcggtattgaccaatcaatcttcctctgtcgaacacattcagagcgccgtcatggcctgctccgccgccggggtaaccgtcttcttcttgtcctcctcttgccacaggaatggcgtctcggcgttgccgtcgctgcagtagaggcacgggtgctgctcgaacccctgatcgctcagcaccgccctggccatgctcaccagctgccggttgctcaccggcgccgggtgcgacgccagcacggtct

SEQ ID NO: 39403 - DNA, 431 bp, Oryza sativa
  Clone ID: uC-osroM202016c03a1
aagggagacacacagcaatgacgtacaagagaatcacaagattgatacatagagacaggcagactgcgccatgcatatatgcaagagcaacacgagcacatgtcagctagcctggcgacattcagaacgtgaactactcaaaacaacagaacaaaataagatccagctgacgcgacgatggcctgacataacacggccactactagcaatcgatcgatcacatacttagcccccccctaattaaccaaccaacaatacttatttaaccactagaaacacactagtgatcatcgatcatcgatcatctagctagctagagtgtgattttgcagctggctagctagagtgatcatctcgatcacctaatgtaaattacttgcagctggaggaggccccggggacccccgacttggacgggatctgcgtggcgc

SEQ ID NO: 39404 - DNA, 429 bp, Oryza sativa
  Clone ID: uC-osroM202016c04a1
gtccacacattcaagttatcatacatcaattccatctccaaatgtttacatcaattccatactttcaaacaaaggcaatacaaagttaacttgagagaaattaagttgaaataataaagcaaggcatcaccttgttaatcttgtttccatgtccaacactgggtgcacaagttttctcccttccagaatcatgattcttggaatttatatgattggccaggaaaatctccgttgaggccaacattgtttgcattaccacgtcttctaagagcaaatccatcagggttcatcgttggaagtatatgaagatgcatgttttccataataagagttgcttttgcttgagatgtttgagaagccagagcacgcaaccagcagcaacggagctcgctcaatcccagacatccttgttggacgaccccctaccct

SEQ ID NO: 39405 - DNA, 443 bp, Oryza sativa
  Clone ID: uC-osroM202016c05a1
tttgcggctagatcgcgagcggccgcggttttttttttttttttttttttttttttttttttttttttttttacagggtagcgaccatatcttaaaaaagccgtttgctttgccgccatggctggcaagctgagcagagcagctaacacaaagaacacgagatcactattaaccaaacgggaacgaacgaagaaaataccgggtcttttttggctgaagatacacgaagcggttcgttttcttttatttttaggctcctctcctcctcaatgatgggggtatggcaatggcaatggcgaagggaccttggcttatttgatgggaaggggctcgccgtcccactccttgaggcattccagcatggggtcgatgagcttgccctggctgatgccgaggaacaccttgtggcacttctctccgggggacttgatctttttgccggg

SEQ ID NO: 39406 - DNA, 425 bp, Oryza sativa
  Clone ID: uC-osroM202016c07a1
ttttggtttttttttttttttttttccgcaaatacttattcatatgttttgacaacatttctcccgacgcatgctcattggggcagacgcagctgaccacctagagcttttagttcaccattattatttagaccaagcatacgtcccaagatcagaacacatgcttacaagcgaaaatactaatagcctggctggctgcttcacagaataaccaaacgacaacctcaacagataaaaaggccacggaatgaaaacaaagcagcgaatcgtcaccagaagtcccattttactcataaaacactccatcattgtgctgcaacgcatccttttcccaggggagaagattgcccagtttaccttccttaacaggagcagggttcaccatattctcagcctcgaagcagtgcaaaacagatttgggcgac

SEQ ID NO: 39407 - DNA, 392 bp, Oryza sativa
  Clone ID: uC-osroM202016c08a1
ttttgggaggttcaaatccaacttattcataaagcatactgctgtcccacaggaaactgtttcataaaactaacatatcatacggactcgatggtccattaaaccagacacaggtatacattagcaccacaaatacttgacgaacataggctcgggacgaccaggcacatccgaaggtccaccaaactggctgattactgaccaccacgtaggcggatcaccaggtggcgggtggactccttctgtatggtgcaaaccgtgagggagcattcatcctccagctgcttgccagcgaagatcagacgctcgtggtctgggggaatcccttatttgtcatggatcttgggctttagattatcaatggtgggggggttatcaacctccaatgcgat

SEQ ID NO: 39408 - DNA, 475 bp, Oryza sativa
  Clone ID: uC-osroM202016c08b1
tatatttctccccaatctcgcgaggctctggtcgtctaatcgaatcctctcgcgtcctcaagatgcagatctttgtgaagacattgaccggcaagactatcaccctcgaggtggagtcctctgacaccatcgataatgtcaaggctaagatccaagataaggagggcatccccccggaccagcagcgtctcatcttcgctggcaagcagctggaggatggcaggacccttgctgactacaacatccagaaggagtcgacccttcaccttgtcctccgcctccgtggtggcatgcagatctttgtcaagactctgaccggcaagactatcacccttgaggtggagtcttctgacaccatcgacaacgtcaaggccaagatccaggacaaagagggcatccccccagaccagcagcgtctcatcttcgccggcaagcagctggaggatggcaggacccttgctgactacaacatcca

SEQ ID NO: 39409 - DNA, 59 bp, Oryza sativa
  Clone ID: uC-osroM202016c09a1
gcaccgctgtcacgtaacgtctgtgagatcctcttatttgacgcggcgcgccctctttt

SEQ ID NO: 39410 - DNA, 484 bp, Oryza sativa
  Clone ID: uC-osroM202016c10a1
tttttgttcaggatcaactaccgttttcgatgtttattgacatgaaaattccagtggttctcactcccagcaacgaacagaaatgaaaatgaaagtggatgaagctaccaaataccagtagcccaatacgccagtctctcccggtgtgttacaaaactggaccttattctctacaacgctcagttgaaatggtagagcggcagctcggcgttgagcgggtgcgacatcaccgtcagcacgtcggtcaccgacagcatcgagctaatcgccgccttcagaacctcccgcgagcatccaggcttcaccatcgtcctcaccttgctgagacagtctttcagtatctcaatgtcgcccatgtagtcttggttctcaatggtcaatgtgatgggttttgcattgcaacccgggccttcatattgaatgcctcctggagtcctgtagaaatcatcaaggagaaaacttgatgctttctctcgcagcaact

SEQ ID NO: 39411 - DNA, 76 bp, Oryza sativa
  Clone ID: uC-osroM202016c11a1
ataggccagttttgagaacagtccgccagagtggatgttaatggaccagccggaccggcaacagctgattgtcctt

SEQ ID NO: 39412 - DNA, 446 bp, Oryza sativa
  Clone ID: uC-osroM202016c12a1
tttgggtttttttttttttttcgttttttgattagaactcagtttgcttacgttttaaatttcgaagaatcaactggtgggctggaataagccctgttcattgaatacttgctgcacattgcaaaagtttcagcttatatgccgcgtttttgggacctcttattattaccaaacattacagtcacatttgactgtatttctcgccagaaccccaatcttcaggctccggagggaaatcaattcaccttgttggcatccttcagaatttttactggttgaattctggcttcctacatatatgcacatcagcacacatgcaactttaattagccttcgactaaatttagatgtctcaatcacaggctcacagccccaacagaatatagtaaacaattgtcacaggaagtgatataaatatcccagaataacccctgtgctcatgatgt

SEQ ID NO: 39413 - DNA, 362 bp, Oryza sativa
  Clone ID: uC-osroM202016d01a1
ttaaggccagcggggactgggtcatgaacagcatgaagaacgcgcccgacagctacagcgtcaccaccggctgttggccacctgccaccgccgcaccaaggaggggggtgcgctacagagggagctcatcacatccctcaatgccggcgccttttgtaccggaaccgacgggcacgttctgccggcggatgcagacagcgcgcggcgatgctacgccgcatcaacaccctcctccagggttactccggcatgacgattacgatcctcgaggccatcaccaagctgttcaaagccaacggtacgccgtgcctagggctcaggggcaccatcagcggctccggtgacttgggcccactgtccta

SEQ ID NO: 39414 - DNA, 418 bp, Oryza sativa
  Clone ID: uC-osroM202016d01b1
ctcgtcgtcgcagatccgatccaggaagagctcgccgccgccgctgccatggcgctctccgtggagaagacctcgtcggggagggagtacaaggtgaaggacctctcccaggcggacttcggccgcctcgagatcgagctcgccgaggtcgagatgccggggctcatggcgtgccgcgccgagttcggcccctcccagccgttcaagggcgcccggatctccgggtccctccacatgaccatccagaccgccgtcctcatcgagaccctcaccgcccttggcgccgaggtccgctggtgctcctgcaacatcttctccacgcaggaccacgccgccgtcgtcatcgtcagggactccgccgccgtgttcgcctggaagggggagaccctcgaggagtactggtggtgcaccgagcgct

SEQ ID NO: 39415 - DNA, 70 bp, Oryza sativa
  Clone ID: uC-osroM202016d02a1
ttctagtgttttgggggcttttatgaaatatccatgtccacacataacgacctttatggacgtataaaat

SEQ ID NO: 39416 - DNA, 476 bp, Oryza sativa
  Clone ID: uC-osroM202016d02b1
ttatcttggtaccttaataatttctagtaccatattaagctaagaacagtagtgtacatggcttctcgtagaagtgcagcagctagtccggccatggcagcagcagctgcggtagtagctgtatctgtatacttgctggtgtgcagtgctccggcggcggcggtggcgaagaagccgtcgtacccgccggtggcgaaggggctatcgttcgaccactacaagaagagttgcccgcaggcggaggccatcgtgttcagcttcctgcgcgacgccatcggcaaggacgtcggcctcgccgcggcgctgatccggctccacttccacgactgcttcgtccagggctgcgacgcctccatactcctcaccaagacgcccggcgggcccgacggcgagcagcaggcgatacccaacgagtcgctgcggccggcggcgttaaggccgtcaacgacatccgcgccctgctcgacagggcgtgc

SEQ ID NO: 39417 - DNA, 432 bp, Oryza sativa
  Clone ID: uC-osroM202016d03a1
tttttggaaatttacaggaattcattgactgcacattcaaaatcagatggaatcacaaaaggagggagaaatctggcacattccaaaattacaaaaattgccattcatcctcagtctcattgcctactctgttctaaattcaccaatactctgttctcttttttcccccaatttctggagaatcaaaatttgtccacacttttcagtgcgagattttgattagtagctccagagcggcatgtcggagccggcgagctcgccgtcctcccaccacgctccggcggacggcggctcgacgagcagcccctgcgccaagctcgcgtagtacgacccggcgtccatcccgccgaacctgaacccgtcgtctagcttcaacgcccccgcgtttaacaccttcgccgacgacaccggcaacacgtccttgctgtcttc

SEQ ID NO: 39418 - DNA, 475 bp, Oryza sativa
  Clone ID: uC-osroM202016d04a1
gggaggggacaggcagggagctcctgcaatttactatagaaaaagagagttgatccagtttataaggaaaaccggacccaaaaaccttacaactgcacagttaattaaaggaaaactggcgaaaacccggcattgacaaaactgaaccaaatgacaattgtccaacaaggaaaaaaactcctagaacgaatccttcaagaaggttacgctgacagaacggcgacaacgtccgatcctaacgaatccaaggttttcacccgaagagtttccttgaagtggagttgaaacgagggctccaaacgcaacgccttcaagaaggtgaacggcgtccgagggcgctgccgttagtagcaccagaagcggagcaaggttttcaccttggagaccctgtcaaccaaagcatccaaaacggaagctttcaaagcctcctgcacaccgaagggtccctgcactatggacaccacctgcacaatga

SEQ ID NO: 39419 - DNA, 459 bp, Oryza sativa
  Clone ID: uC-osroM202016d05a1
aggagttcgacaagcacgtgcattcattcattagtagttcagcaccagactggattctccgttcacccatacatagcacagggacctggcttctcagatgagaaattccagttttcaagtagcgttcgtagaattttccaggaagtattaagtgtaagaaccatcttctagatactatatagccacccacgataaactgacaagtcggcaaacttacagacaaactaatactactatatatactaagatggcaccaaaacaaaacaaggaattgtcttgttctaactgactatttcaaggtaatgctgaatcgcacaccttatatgacctcccagtgagcgactcgaagatactcttttgatgctttagcatgtggcgcacatagtacagaccacgaaaatctgctatgaaaaacgcctttagcaaccacagatgcaaatggaagacaactgacagctc

SEQ ID NO: 39420 - DNA, 521 bp, Oryza sativa
  unsure (1)..(521): unsure at all n locations
  Clone ID: uC-osroM202016d05b1
ttagatgtggtcccatttagttttttggcatggattcgatactatgcttcggccctgtttaatagtccgtcttggtcttgcatgctctagtctagccccttctgatagacctcggtttgggcaagcagtagtttctcaaatcgacaatggtattgtatacttgaccaacaaagaagatccgagaataactgttttgctggattgtcatgggatttctccattcagatttccaatgcaaatngatgaggtcgtttatcactatagttcaagaaaactatccaaatcgtcttggggtactatttatggtgcgtcttcctcctgttgtcagagtaattgcgcagactcttattcaggttctgaaaccatccacaaagcagaagttgcgttttgagggagaatcatataagaagacattagccgagttcttgcagattgtgccaacttttcttggtggcaaatgcagctgcccgcaatgtgagaagccgcgtaatatttcagtaatacaggcaggggaaggcagc

SEQ ID NO: 39421 - DNA, 376 bp, Oryza sativa
  Clone ID: uC-osroM202016d06a1
ttttggttttttttttttttttttttttttttttttctccttattgtttttttttttttaatttaattttaagtggcaaattaccacatttcaaccttaatagtttaaaactgacaaaagggagaaacatcttatgataagagatgaaactattaatgactgaaacctaaattaagacgacaccgacgcgacgacccaatggcaaagggaagctgctcagccgggcgcgaaaaaaaactccgaggcgaaccttttggaccggaacagcttttccatctccggggttgcgttaaacgatgcctacaggaactccggaaagaacgcctttcacaccgaaatttttccccgccggggaccgaaaaacgggtttgggggg

SEQ ID NO: 39422 - DNA, 341 bp, Oryza sativa
  Clone ID: uC-osroM202016d07a1
gacgagcggccggggttttttttttttttttttttacaggcaatgaccagttgatgtattgagaaactttttacttgattcattacaggagtacatgtcaaaccagaacaaataaaacaagaaaccatacgaacactttgggagaacatgtatttctactttaatactactatggcagtcgatgtgatcagaagtcctcgtcgatgctgaagacatggttgcaagaagcgccgccgttgaggctggacattacggacgccttctggtagtcgccgacgcgcttttcgaagaaattggtcttgccctgcagggagatgagctccatccaagtcaacgggttg

SEQ ID NO: 39423 - DNA, 487 bp, Oryza sativa
  Clone ID: uC-osroM202016d07b1
ttccaatccccaaaccaccagatcgaatcgcggttgccgcggcggaggcgaggaggaagacgaggatgccggcggcggcggcggcgaagacgctggtgccagcccgcggcggcggcgacatggaggagccgctgctggcggagtcgtcggatcgcttctcgatgttcccgatcaggtacccgcagatctgggagttctacaagaaggcggtggcgtcgttctggacggcggaggaggtggacctctccgccgacgcgcgccactgggacgccgcgctgtcgcccgacgagcgccacttcgtctaccacgtgctcgccttattagcgggctgcgatggcatcgtgctcgagaacctcgcctccaggttcatgtgcgacgtgcatgtcgccgaggctcgcgccttctacgggttgcagatcgtgatggagaacatccactcggagatgtactcgcttctgctcgagacgtacatccgcgacgacgtcga

SEQ ID NO: 39424 - DNA, 428 bp, Oryza sativa
  Clone ID: uC-osroM202016d08a1
ttttggtttttttttttttttacatctccacacacaaaaacatatatatacttctcattgcaatccaacaaattccacgtgagtggtagtctcagacatattgttgggcatatatgccagggcctcatatgacgtacacacactgataaaaccattccacccaggagaacaaagccgagatgaaaaccatggtacatctttaaaaggctgcacattttgatgagtagcgcaaaagtgatgcgttgaacaaacgtcatggatccattttacatatacttgataagaagccacacgataacagcaaggatcactattgcgacgacagatagcagcaggcacatgcatgagcagccacctttggtgcgcttgttcagaattgcaagccttttttgcacacgctgaagacgcgagtttgtaacattaacatg

SEQ ID NO: 39425 - DNA, 506 bp, Oryza sativa
  unsure (1)..(506): unsure at all n locations
  Clone ID: uC-osroM202016d08b1
ttagtaccagtactcaccacctacgcggtcgcccaccgcgccgtcgccggcgccggtcagcccctcaccgccgcctcccgttcgccaacgacgtcgtcgccgtcggccctatcccccgtcagctccgtcaaaggcacggagaaacgaacaaacgcgagagagaaaacaagaagaggaggaggagccgacgcaaccgaggccccagttccgattgatctccggttcccagatcggccagcaatggcttcatcttcggacccatggatgaaagagtacaatgaggcatctaggcttgctgatgatatcaattccatgattgccgatagagggtctcttccacaatcaggcccggaaattatacgtcacacatcagccattcgaagaaaaataactattctttgtactagactggatagcttggaagcattgttgtccaagattcctccgaagtcactcagtgacaaggagttacacatgcgccaagacacgctntncaatttgaatct

SEQ ID NO: 39426 - DNA, 367 bp, Oryza sativa
  Clone ID: uC-osroM202016d09a1
gactccatgcatctttattttccatataagtttcaagactgacaactgtacctcagtgccaatggcaatctacatgtatggggctgtgaaattgacttcaaaatggtagcacttaaatttgttgtaagtagtatagaggtcagggttgctatcaatcagctaacccaaagaatagaaggcagctcaattaacccaactgcatcatatattcatatatggtgttattttttagataggtggtactcgaagcatcctagagttctggtgggggcaggcagaactgatagaactgtatcttcaatggcaaatcaaagattactggtgcaataatcccaccagatcatataccctggttgtataaagatct

SEQ ID NO: 39427 - DNA, 473 bp, Oryza sativa
  Clone ID: uC-osroM202016d10a1
acccaatggtgaatataccacaaagttatttatagtctaatggttacaggccttgcaacctaagctaactgattgccttattttccatctgtcccactaactgagaaatgcaatcttacagaaatgcaatggcaaaaaaaaaaaggagcgaaaatagatatcatctgtctcatgccttctgttctgtggtcaaatcaccccatctgacgttgtactttgctgcaaggtagtgagcccctacaggaccgcggcttccataagggtatagctcaggggctatccgcttctcttccagctccttgagtaagggagtgaagagctcccatgcggcatccaactcatcagaacggataaaaagccttcgctctccttcaatggcatcaagtaagagcctctcataagcatctggtatctccttggagtaccttgctgcatagggaagattcaaattacttttatctagtctcatacca

SEQ ID NO: 39428 - DNA, 414 bp, Oryza sativa
  Clone ID: uC-osroM202016d11a1
ttttgtttttttttttttttttttttttttttttgcaccaaaaggcacttttgaatagaatagaattttagggggcgaatcaccacagttcaaccgcaatagcataagactgacagaagggagtaccatctcatgataagagatgaaattattaatgacttaatcctaatttaagacgaccccgacgcgacgacgcaatggcaaagggaagctgctcagttgggcgcgaaaaaaatctccgagtcgatccttttggaccggaacagtttctccatttccggggtcgggttgaacgacgcctacaggaccttcggggagatcggcttccacaccgacgttttccccgccaggggactgaagatcgggtttggcgtggtgataatggaaaaccactgcaggccggaggcgtccgcg

SEQ ID NO: 39429 - DNA, 441 bp, Oryza sativa
  Clone ID: uC-osroM202016d12a1
agcttctatttacccacctggaatactttggttgtcctttaatgtaaaaaactttgcagggtttccttctcagcaccttttttacacctaaacatcgagggctgaactccatatgtgaactattccacccaaagaatgaaatggaaaaagaaacttcaaatccacaaggcaaatggtaagccgattacgatatttgcccaatatgtcaattttttctaacactttatttcacgttattgctattccttttcttccccgagtgtccagtatgtctttacaacaaggaggagcttctcccggacgagcgggccatcttcgtgatcaacgatttggctgttccatctcataccgtcggtaatgctctttattttcaccaacatatcaacatcatctcttataatcactgtaccctcaggcctcagtattctgtccatttccagc

SEQ ID NO: 39430 - DNA, 309 bp, Oryza sativa
  Clone ID: uC-osroM202016e02a1
cctctatttcgggcgccctttttttttttttggtggtgaaaaggatactgcgctcaaatttaacaacgtaaaatgtgtacgttctagatgtgcatagcagccgacatacatcatttacagaaaatgaaccgtacaggtttaaaaccaaaatctagcctgaagttctgaatcgtatgcatttttagtgacctactctagattccaaagatgcaacacagccatccctgggggtataactgggatgcaggaacatgaacgtgcctcagctacacatgatatagcggcccttgtcggatgacatatattgaa

SEQ ID NO: 39431 - DNA, 377 bp, Oryza sativa
  Clone ID: uC-osroM202016e03a1
ttttggggtttttacggaaaaagcaaatccgttttacaaagcattattattcagagaacacaatatgacactcgttgaacaggacagactagtaataaaattcaaagggccttgtgcacaccaaggatagacctagaccgaaattcaacggtgacacataagcggctgatgcacgcacgcgaacagaacttttttttgatgtttttgggcgcaaaaatgcacgggagaggttccttcggacggcttatttatatttccacagcagcggggactctgctatcatgccggtgacaacctatggtgccatgttggaggccgggctactgctctggaagtaccccttgaccttcttatattggccgtgccacaaacggatg

SEQ ID NO: 39432 - DNA, 475 bp, Oryza sativa
  unsure (1)..(475): unsure at all n locations
  Clone ID: uC-osroM202016e03b1
ttggttgcttgggcttctacacctcattttgcgcttgcatcttgctcattcagatctcttctgctttgagcaatggccaacctcaccgacctcgttaacctcaacctcagcgactgcagcgacaagatcatcgccgagtacatctgggttggaggatcgggcatagacctcaggagcaaagcgaggactgtgaaaggccccatcaccgatgtgagccagctgccgaagtggaactacgacggctccagcaccgggcaggctcccggcgaggacagcgaagtgatcctctaccctcaagccattttcaaggacccgttcaggaggggcgacaacatccttgtgatgtgcgactgctacacgccacaaggtgagccaatccccactaacaagaggcacagtgccgccaagatcttcagccaccctgatgttgttgctgaagtgccatggtacggtattgagcangagtacacactcc

SEQ ID NO: 39433 - DNA, 510 bp, Oryza sativa
  Clone ID: uC-osroM202016e04a1
cgcccccgtccgtagcctggagaccctttttacgggccgcccttttttttttttggggaccacaaacgttaccattcaagattctacattatatttgtttatacagcaggggttcagagtacaagattggccgggtagtatatcaccatttgagcaaaacagactgagcaaatgcaacataattttcgctgtgttaaggcactcaaaatggaacatgggggatcaattgtgttatctgcaatctggcaagcgttttccgcggacgtgttcaagcgacggcttggagagctctctcgaagttatcttctgctgatacggcacgctttactagcacatgatcggggagtgatagttccagctggctgaggtatcttgatgacggtttgccaagggggagattacacacaataagattagcaagagtttcaggatcttttgcatccttgttcaatgcttcgaggaaaagagtgtgagcctcatcaaagctccccatgtgcaatacagcaaact

SEQ ID NO: 39434 - DNA, 312 bp, Oryza sativa
  Clone ID: uC-osroM202016e05a1
ttgtgtggaatagccgggaaaggccaatgcactcttccatgaaaccataagcacaacacgaaaatgatgcattatgcacaagacgacaggctcaaaaccattctttgcatggacactcgtggtcacaatggagccggttccagggggggagcgcacgctatttaagaccgataacaaacgcgaacaaggcgcaacagtgggtgccaaaaatgggctccccccagaacctaaacttggaaaggagaccgaagacatccctgggagaaatgagcacctgcggaggttttacaacccatggtcgctgacaagacc

SEQ ID NO: 39435 - DNA, 260 bp, Oryza sativa
  Clone ID: uC-osroM202016e06b1
tgctgggacgcctcgcgggcccggcccggacctgccgggcggccgctctcgaggtttctttctggcgtacgccggcatgcgacgacagggctattatagagcggcacctacattcaattaacgggacgtcgaacaacatcgtaacgcctgcaatatacgtggcgcttcccagcgaaatgtgctcggaacccatatttgtttattctgctgaagacatacaaatatggatccgatcatgagacacttacaccggttgatgc

SEQ ID NO: 39436 - DNA, 393 bp, Oryza sativa
  Clone ID: uC-osroM202016e07a1
ttttgtgttttttttgggtacaacatgtacacatgcccagccattttggccattttccagcaaaagacagcgtatataatccactagaagaattcgatcagttttctcttctcaataaaacaagaacaacaagaattcagtttcacccacagctacttaaagactacagagacagtggtagtaaaactgacatccttgtgggtttcacagggaaacgatgacttgtacaagccaaacagaaacagaagtgaagtgaagtgaagagaaaatttgcataaatgagaattcagacctcggccttgtgctcggggcgatgggtgaactcgaagtcgacgtgcacaaaggcgcgctcgacttcggggagttgctccagcttctcctggagcgactccc

SEQ ID NO: 39437 - DNA, 452 bp, Oryza sativa
  Clone ID: uC-osroM202016e07b1
tactcctccttgcatgtctcgtgaaccaggtaggcggttaacttgtatatcaaacagacgccgcgcgcgcgagcagttcgtcgtcgtcttcgctcgatcgtagtagttgccggccggcatcggcatgggcgacggcggggagaagcaggcggcggcggcggaggggtggcggctgagcgtcaacgacttccagttgccggagcggcccaaggacccgcacttcgtcaagagggtcatcaagcgatgccacggaaagcatcggaaaattgcaaaatactacaagaagcaggaaaatctcctgaaggatttcagcgagatggaaaccatgaatgagattggttccttagatcagaatgctcctactgaggaagagttgaggcatatggcaaagggcgaacgattggccatcaacctgtcgaatatcatcaatctgattcttttcattgggaaag

SEQ ID NO: 39438 - DNA, 431 bp, Oryza sativa
  Clone ID: uC-osroM202016e08a1
gttcttggccaaacatttgtgatatttctgacctgattaggcctccatgaaactctctacatgttactagatacaaactgattttatcaaattggctactctaagtattacaaagtattatctgggagaagatctgtacaaaggggggcattggattattcttccagagcaaaaaaccgatgaaattatctggccaagcctggccacaatcaagcaatacctactttgatctaatccctctacatttccaatatgtatgtcatcatacttgtcatatgtatagaactttgtatgtactaaacatggccgtgcgaaaactttggttttgattccagataactagaaattttccttgaggaagtcgaatttcgcgctcgggtttctcgagaaatcttgagcgagctcacgcagttcctttctcagaccggcgc

SEQ ID NO: 39439 - DNA, 398 bp, Oryza sativa
  Clone ID: uC-osroM202016e09a1
gtcaaggccagcagggactgggtcatgaacagcatgatgaacggcaccgacagctacggcgtcaccaccggcttcggcgccacctcccaccgccgcaccaaggagggcggcgcgctccagagggagctcatcagattcctcaatgccggcgccttcggcaccggcaccgacggccacgttctgccggcggaggcgacgcgcgcggcgatgctcgtccgcatcaacaccctcctccagggttactccggcatccgcttcgagatcctcgaggccatcaccaagctgctcaatgccaacgtcacgccgtgcctgccgctccggggcaccatcaccgcctccggtgacttggtcccactgtcctacattgccggcctcatcaccggccgccagaactccgt

SEQ ID NO: 39440 - DNA, 449 bp, Oryza sativa
  Clone ID: uC-osroM202016e09b1
aaaatagtatcatcaccatgttcatctagacatagtagaaaacattcacactctcgaaatgctctctatctttcagttttgtgttgctatacgtcttcttgttttgcattttttttagtattccatttctgttcagcagagtggcagtggcgcgccattccattccttgaggcattcgagcagcgggtcgatgtgcttgcgctcgttgatggcgacgagcaccttgttcagctcctcgccgggcgaccgcgtcttctcgccggtgaggtactcggtgccgaccttctcgcgcacgaaccggtagagcgggtacgagcggcactccttgatccggttggggactagcggggtgccgttctcgacggcggcgcgggcggcctccacctccttgggcagcgcggcgcggacgtgctgctcgaactcggacaccttggcgataatggaggtct

SEQ ID NO: 39441 - DNA, 485 bp, Oryza sativa
  Clone ID: uC-osroM202016e10a1
gcctccttccggctggggatggtgcgggtggtctcgttcctcgtcgggggcctcaacgtggccgtgctgctgctcgggctctacctcatcgacggcgtgctcccaccggggtgcggcggggggctcgcgctcgccgcggcgcccgcgctggcggggatccgcgtgctcgccatgatcggcaccgcgcgcgcgcagcacgccacggcggatgccatcgcgaggcgccacctcgacgaggccgcagcgtcggtcgccgctgacgccgttgcgcgccacgagatcagggtgaggtataaacgctggttgtggtggactagattcggcatggcagtgggtgcaatgcaattggttggggcaatttatctcatgcttgtcattgtcagagatatttcaaatgaaagaagagccacttcctgtttctttggacaggatgaagctgatcatgtctcgaaacgagcattaattgctttggttcttattctttc

SEQ ID NO: 39442 - DNA, 510 bp, Oryza sativa
  Clone ID: uC-osroM202016e11a1
tttttgttaagagccgggaaatgccaatgcaagcttccatcaaaccataagcagaacaagaaaatgatgcatgatgtacaagatgacaggccgaaaaccattctttccatggacacactggtgcacaattcagttggttacaagggtggagttcacactatttaatccccatcacaaacataaaaaaggcacaacagtctgtcgagaaaatgagcttcccccagaacctaaacttggaaaggagacagaagatatccctcgcagaaatggccacctgcgtcatctttccaatccatgttctcttagaagaccagcgtttgtggcatgtcaaaaagagcgcggatagtctcactagccacatccaaaagctgtaaatactcatccgttccatcgaccaagcacttatctgcttccccaagctttttacatattcttgccttctgctcatctggaatatcatcggcattaactatcacatttagaaactgtgagaacaactgtgaaacgggg

SEQ ID NO: 39443 - DNA, 534 bp, Oryza sativa
  Clone ID: uC-osroM202016e11b1
tagaaccagagagaagaggcgggaagcgaagccgcatcccgccactcgcctccgccctccgcgcgcgcgaacccctccctcggcggcggcgacgaccaaggcggcggcggcggcagcggcgcaagaggacgcggtagcccgatggcgccgctcgtgccgtcctcgcagccatgggtggagaaataccggccgaggcaggtgaaggatgtcgcgcaccaggaggaggtggtccgggtgctcaccaccaccctgcagaccgccgaccttccgcacatgctgttctacggcccgcctggcaccgggaagaccaccaccgcgcttgccattgcttaccagctctacggtccagagctctacaagtcaagagttctagaacttaatgctagtgatgatcgtggaattaatgtggtgaggactaagatcaaggactttgctgctgttgctgttggttctgcacgaaaaggcggttatccctgcccaccatacaagattattatactagatgaagcagattcgatgacagaagatgcccag

SEQ ID NO: 39444 - DNA, 359 bp, Oryza sativa
  Clone ID: uC-osroM202016f02a1
gtcgtaaaattaacagacgttcatcaagggctcctttagaattcgagaacttgtttaggtaaggtgctactgaaacagtagcaaaagaaaataccaaaatccgtatgttcagaatccacaaatttatccagccattttgactcccctattattggacaacttcatcatgctgacttcttgccaccgaaagggagattccaaccgtacgcattgcctttctttgctgctacatccagccgctttgcaccaaccttgtccataagccagagaccaaccggcggcatgtattgcaccaaggacataacccctagcacaggctgatatgatatccatgccttctttaatccgggagttggtgc

SEQ ID NO: 39445 - DNA, 449 bp, Oryza sativa
  Clone ID: uC-osroM202016f03a1
tttttgtattagccgtactgaacaggtcgtcttagttattcttctgcagatgtcacagttaaaagcgatgtggcacaggcatatatctaagtttgaaatacggatctatgaatacaagaaaatgccatcaatagagcaaactcgatggtcgacggatggtagaaacaccacgaagaggaagatgcggttacgacggtaaattttgctcactccgaaagcgtggacttcagctctccactcttctccagctcaagaacgatgtcacagcctccaatcagttctgatttgcagtacagctgagggaacgtgggccagttggagtacgccttcaagccttgcctaacctcctcgtcggataggatgtctaacgctccgaagctgactcctgctttgttgagtgcattcaccaacctttcaactgaagccagagcggggggcatttggggggc

SEQ ID NO: 39446 - DNA, 472 bp, Oryza sativa
  Clone ID: uC-osroM202016f04a1
ctcggtagataccgtgatgatttgcacttgataatgccaatctaggtataacatatgtgattttacatcagcacaagacatcaaaaattgcaagattatacaatgtccatgttctaacatccccagtgcttatctatacacataagtgaagcggcatacgcagtctgcagtctataataatctcatcatctttgtaaggttagcgatcttaaatcaccgaaacagctgccattggcaggcatagcggtctagtttttaactccggaatcccactcagcttcacgatagagcagtttcgacggtttgatgaaggaaaccgggaggcgacattgccggcatcgcttcttcctgggcatcaaccatttctaggatctttcttactgtggcttgcaaatgatcaccttgggttatatttggatgaatagactccttggttttgagatccgtatttgatgacttaaattttgcatgc

SEQ ID NO: 39447 - DNA, 480 bp, Oryza sativa
  Clone ID: uC-osroM202016f05a1
cgagaacaaccccttcggcgcccgcgccgtccgcctctacctccgcgaggtccgcgagcaccaggcgcgcgcacgcggcgtcagctacgagaagaagaagcgcaagaagccaccccacccctcctccgccgccgccgcgcacgacgacgccgccaacggcgccctccaccaccaccaccacatgccgccgcctcctcccggcgccgccgcctgagccgagccgagcttgctccaagatcgccggaaaacgagctgctagcctcctacgcatgcactagttactccactccactccactccactatgatccctagctaggctgctcttgctactagcaaaactacggattaatctccatgcttgctactgctgctgctgctgctactgcatctaattaattaggttgattatttcctgatcgtttcttcccaactgggtcgctctcgcacgtcgcttgtctactactatttgctggaattt

SEQ ID NO: 39448 - DNA, 412 bp, Oryza sativa
  Clone ID: uC-osroM202016f05b1
gagaagctagctagctatcatatcatcatcacaaacagcagtagttgattacacatgaagtagggaggagaaggccgaagagatgaggagaggagaaaattaccagcaaatagtagtagacgagacgacgtgcgagagcgacccagttgggaagaaacgatcaggaaataatcaacctaattaattagatgcagtagcagcagcagcagcagtagcaagcatggagattaatccgtagttttgctagtagcaagagcagcctagctagggatcatagtggagtggagtgggagtggagtaactagtgcatgcgtaggaggctagcagctcgttttccggcgatcttggagcaagctcggctcggctcaggcggcggcgcccggaggaggcggcggcatgtggtggtggtggt

SEQ ID NO: 39449 - DNA, 363 bp, Oryza sativa
  Clone ID: uC-osroM202016f06a1
gtacgcaaacatgacgactttcattgcgtaatacaggtcgttgaaagaacaaccaacaaagcgaatgcacctcttttgggttcttttttaattgctaggcggccttgcaactacatcaaccaatataccaccactatatgctcatgctattgtctccatagagactacgctacttatcaactcacacttgcttggaataaataccaactaaatgaattgacttgatctcttatcatacaagtcacagacccgaattgggtagtgaagaatgaatggccaagagaagagaacaaaatctatacattcgtgcatcaatgtacttgaggtgcgtctcttaatgctacattcaaactgctttacatt

SEQ ID NO: 39450 - DNA, 417 bp, Oryza sativa
  Clone ID: uC-osroM202016f07a1
agaaactaaacgcaacacaagctcaaacatgcattactgaaagtaacaaaccatccataatatatcctttatttgttgacaattcatatcatgatatagcacaatgtttccatcgccaacttgtactacgggtgaagcacaattgagtctacaataacatctatttatccacgggatgatctttcaagaatgcaagaaggagctcattcacatagtcagggaattgctcctgcacaaaatggctcccttcagggatataggtgatcttcatgtctggggcatgcctttccatagggcccgcttttatagcagactccgcccccggggaacttgaaaacataatctttctccccatgacaacaaacactgggacttggaatttgcatctccaattggttcctcttatgagagacctat

SEQ ID NO: 39451 - DNA, 286 bp, Oryza sativa
  Clone ID: uC-osroM202016f08a1
ttttgttgcaagctgaaaacctgtcataaccctcgtagcatttgattggagaaacagatgttcacaagtagatacagagctaccgaaactggaagaacagaaacccgagggaatggacacacggaacataactgaagggcaaagtgtttacattattatgattgagcccaggttgcaacaagtgctaaaagtttgtactgaggatttgttggcctggagttggcagcagaaaccctcgatccccattccagcagctatttgctggtgtcgaacttgtgcgcgatca

SEQ ID NO: 39452 - DNA, 352 bp, Oryza sativa
  Clone ID: uC-osroM202016f09a1
tttttgggattagcccgtactgaacaggtcttcttagttatttcttctgcagatgtcacagttaaaagcgatgtggcacaggcatatatctaagtttgaaatacggatctatgaatacaagaaaatgccatcaatagagcaaactcgatggtcgacggatggtaaaaacaccaggaagaggaagatgcggatacgacggtaaattttccttactccgaaagcgtggacttcagatctccactcttctccagcttaagaacgatgttacagcctccaatcagttcctgatttcgactacagtttgaggaacgtgggccagtttggagtacgtcttcaagccttgcctaacctt

SEQ ID NO: 39453 - DNA, 449 bp, Oryza sativa
  Clone ID: uC-osroM202016f10a1
ttttggttttttttttttttttttttagcccattaaatgaaatttttaaaaaaagtatcataaggtaacatgggcatctcaaacgttcaaagctgcaacatgcgcatctcaaccgtgacacctgatgtgtacatagcatgaacatgccgtcccaaatgatctcaaacgatattcattaacaaatcatacaatccgctccagctttttagcatagctgagcgtttggttgataacctgcaaagatggtatctccttgcagggctgggtctccttcgccttctggaagaagacggaaccatcctttatctcccattcagggtgctcctctgcgatgtactggtgcaattctttgtcagagctgaacatcagcacttgtcttgcttcagctattgacatataatcataacccttctcactgcaaccagccagttcatctctgactgttttgg

SEQ ID NO: 39454 - DNA, 466 bp, Oryza sativa
  Clone ID: uC-osroM202016f11a1
tttttgtacgacaaaccacgaacttggatattaaagatgccacaaagaaggttcacataaacaacacaggtcacagcagcgaaagctacaagcaaaccctgcataatcgaaaagcaaatgtttttcaaaaccagacacacaaactgatagatagaagcccacacggacagatcataggatagcagcagtaatcaagcattgccaaggcaccaggcaagaaccctgaacctctctagtactcgccaccctcatcaccctcgtgaccatcgtcgaactcggagccgacctcctggtagtccttctccagcgcggcgaggtcctcgcgggcctcggagaactcccactgctacatgccctcggcgacgtaccagtggacgaaggcgcgcttggagtacatgaggtcgaacttgatgtcgatgcgggagaacacctcgacgacgctggtggagttggagatcatgcacac

SEQ ID NO: 39455 - DNA, 528 bp, Oryza sativa
  unsure (1)..(528): unsure at all n locations
  Clone ID: uC-osroM202016f11b1
tctgtctacccgaggatccacttcatgctttcctcctacgccccggtgatctcggccgtgaaggcctaccacgagcagctctccgtggcggagatcaccaacagcgccttcgagccgtcctccatgatggccaagtgcgacccgcgccacggcaagtacatggcgtgctgcctgatgtaccgcggcgacgtggtccccaaggacgtgaacgccgcggtggccaccatcaagacgaagcgcaccatccagttcgtggactggtgccccacggggttcaagtgcggcatcaactaccagccgcccagcgtcgtcccggggggagacctggccaaggtgcagagggccgtgtgcatgatctccaactccaccagcgtcgtcgaggtgttctcccgcatcgacatcaagttcgacctcatgtactccaagcgcgccttcgtccactggtacgtcngcgagggcatggaggaggggagtttctcgaggcncgcgaggacctcgccgcgctggagaaggactacgaggaggtcg

SEQ ID NO: 39456 - DNA, 553 bp, Oryza sativa
  Clone ID: uC-osroM202016f12a1
tttttgtgaccacaaacgtcaccattcaagattctacattatatttgtttatacagcaggggttcagagtacaagattggccgggtagtatatcaccatttgagcaaaacagactgagcaaatgcaacataattttcgctgtgttaaggcactcaaaatggaacatgggggatcaattgtgttatctgcaatctggcaagcgttttccgcggacgtgttcaagcgacggcttggagagctctctcgaagttatcttctgctgatacggcacgctttactagcacatgatcggggtgtgatagtttcagctggctgaggtatcttgatgacggtttgccaaggtggagattacacacaatatgattagcatgagtttcaggatcttttgcatccttgttcaatgcttggagtaaaagagtctcagcctcatcaaagctccccatgtgcatacagcatactgacttgccatttagaaccattcctgccatcgggtatttttcagcaaagccttggaatatgaggtaagctttacggatcttagagccaccaacag

SEQ ID NO: 39457 - DNA, 472 bp, Oryza sativa
  Clone ID: uC-osroM202016f12b1
ctcctcgtcgccgacgagccgcctcctcctcgtcgtcgccggcggcagagcaccggagcagccaccccatggcgtccccggacctcctcttcaacctgcgcaacctcttctacctcggcgcctaccaggccgccatcaacaacagcgacgtcccgggcctcgacgccgacgccgccgccgagcgcgacgccatcgtcttccgctcctacgtcgcgctcggctcctaccagttggtgatcagcgagatcgactcgtccgcggcgacgtcgctgcaggccgtgaagctgctcgcgctgtacctctccggagacaaggaaagtgcgattgtcagtctgaaggaatggttgagtgattcggcggttggaagcaatcctgttctacgattgattgctggaattatatttatgcatgagcaagactacactgaagctctcaagcacacacactctggtggaactctggacctgcatgc

SEQ ID NO: 39458 - DNA, 285 bp, Oryza sativa
  Clone ID: uC-osroM202016g01a1
ttttggtttttttttttccagcaacagagatcataacttaagaattattatctccatcacataaaaacatacagtgactgactactggattacacgattgagttgttcagggttaacataggaaaaacatcttggggactagagatagagggaatcgacagatgccctgcaataacgcgcgggaaacaggacatcacgattgcgtggaatgttcccggctgcgcagaggcggctcggggcttaagacactggttttgaatgggatcgccctgaagatcacctggt

SEQ ID NO: 39459 - DNA, 256 bp, Oryza sativa
  Clone ID: uC-osroM202016g02a1
aggcgacatctatggagaatatacacgcggcgtgcgcgcgcacgcaagctcgtagcctctattttgggcgccctttatttttttcttggggggttaccatttcattgaggatctattacatttttcaacttttcgagaacaaaaacatggggagcgcggcgtggatcaaccacgccttttataacaacacctacgtttcctacaaaaccgaaccgcttatgcccaggaatacccaggcctgtctacagcatcctac

SEQ ID NO: 39460 - DNA, 313 bp, Oryza sativa
  Clone ID: uC-osroM202016g03a1
ctcagactgcatcattcaatttatacacatcaggtagatcatacatccatgtctgttcttcttttttcttcagaaagaagcaaccaaagaggtttgtccgtgtactagctactatatatcataaaaccatacatgcttggtttcagcttatgaaatatacaggctaatctccgtgatctgaagagtgatctacatacactcttcatgcagatttagcgaacccgatcctgtctttgccgaagtcgaaaacccgatgaatagcacccatgaagacctctcccagaatccaaaaaggaccgcgtggtggaggcat

SEQ ID NO: 39461 - DNA, 386 bp, Oryza sativa
  Clone ID: uC-osroM202016g05a1
ggaacgcaaagtgttttttctcttttccgaaaaaaaccccggaaaaccccaaaacaccaaaaactagatccccaaacggatcgaagcgcgcggtggaaaaagaaacgaaaaagaggagaggaaaacaaagaaaagaatcgatgaactagtgatggtagtggtggtagtagttctaggagagtggtagttattattcaccacgccacgctcagaggacggcggcgagccccgtgacgaccttcgctttgggaggctgctgatgctgctgccacagctgcggcggcgatggcgacggcggcggcttcttcttgctcgcctcctccgtcgggcgccacggcgacggagacaccaccaccgtgatcttctccgcggcggggatctccccg

SEQ ID NO: 39462 - DNA, 339 bp, Oryza sativa
  Clone ID: uC-osroM202016g06a1
ggaaggggaacaagcaactggtggagagatagtacaccgggcacacacccacaatttgacggcaaaaactgatgcacaaggggtacacccccacccccaaaattagcaggctccagccccggaattaacagagcgggcaatttacgtcccccacacgaaccaccaagcaaccaaaggtggggccattcccccgggaacgcgcgcgcgttttatgaaactctttccggggtgtacgaagcaatagggacacgacccaaaacacccccaaagaccttgtttgggatgacaagaccgaaatcgactggtaattttccgagtaagaggacacaatcgagaaca

SEQ ID NO: 39463 - DNA, 497 bp, Oryza sativa
  unsure (1)..(497): unsure at all n locations
  Clone ID: uC-osroM202016g06b1
ttgcgtgcgagctagccagccagtgttagagcttgagctgcttgttcttcttctacctcctgcactcgcgtgctgcacaagtagctcagctagatagagcgtcagaaatggccagcaacaactcgagaacaaactccagggcgaactactccaacgagatccacgatctctccacggtgcagaacggcaccatgcctaccatgtactacggcgagaaggccatcgccgacttcttccctcctcacctcctcaagaaggtcgtgtcggaggtggtggccacgttcctgctggtgttcatgacgtgtggggcggcagggatcagcggcagcgacctgtctcgcatatcgcagctgggacagtcgatcgccggtggcctcatcgtgacggtgatgatctacgccgtcggccacatctccggcgcccacatgaaccccgccgtgacgctcgcgttcgccgtgttcaggcatttcccctggaatcaggtnccgtctactggg

SEQ ID NO: 39464 - DNA, 364 bp, Oryza sativa
  Clone ID: uC-osroM202016g07a1
tttggtgtttttttttttccagcaacagagatgataacttaagaattaagatctccatcacataaaaacatacagggactgagtactggattacacgattgagttgttcagggttcagataggaaaaacatcttggggactagagatagagggaatcgacagatgcgcagcagtagcgcgcgggaaacaggacatcacgattgcgttgcatgtcgtcggttgcgcagcggcggcgcggggcttaagacctgctcttgaatgggatcgccctgatgatcacctgggggtagatggcagccagggcagcgccaacgaagggaccaacccagaagatccaatggttatttcaggcatggtccttgtt

SEQ ID NO: 39465 - DNA, 480 bp, Oryza sativa
  Clone ID: uC-osroM202016g08a1
gcaccccgtactggggcggcaaccagtacatcgagtactactacaactccaccagctactgggacgagtacatgtggagcgcggcgtggatgtactacgccacggggaacaacacctacatcaccttcgccaccgacccgcggctgcccaagaacgccaaggccttctacagcatcctcgacttctccgtcttcagctgggacaacaagctgccgggcgccgagctgctgctgtcgcggctccgcatgttcctcaacccgggttacccctacgaggagtcgctcatggggtaccacaacaccaccagcatgaacatgtgcacctactttccgcgcttcggcgccttcaacttcaccaagggtgggctcgcgcagttcaaccacgggaagggccagccgctgcagtacaccgtcgccaactccttgctcgccgcgctctacgccgactacatggagtccgtcaacggtccccgctggtact

SEQ ID NO: 39466 - DNA, 305 bp, Oryza sativa
  Clone ID: uC-osroM202016g08b1
attgggagcctatttggaatcacaacggctgattcatccaccgggatcataatttatttgaagaaaacatttttcatctacagggcatgcataaagcattccattatccacagtttggattttgccgaaattaacgtggataatacaaaaaaattgggtgatcaccaaaaactggatgaccaaacgaaccgaaacacctggttgatctaatgaaacacctttggaaccactaggcacggagatgtacttggccggccggttggattgaattctctttaacgggttccacttggacggaagcgggg

SEQ ID NO: 39467 - DNA, 447 bp, Oryza sativa
  Clone ID: uC-osroM202016g09a1
ggagatgagcaccgcgacgcacttgatgctcttgcacaccgtctggatcaccgtcggcccgggctccgggatcgtcaggttcaggttgtcgccgaacccctccgcgtacggcggctcgccgaccaccacgatcgcgtagtcgtacttgtcgccggtgaccacgctgctgtccgggttctccgagtacaccaccgtcgtgctgggatcaacggtggccttgatcgccgacaggatcgtcgtgccagcagtgatgttgttgccgggctgtccttgccaggtgatggtccatcctccacactgtctgcccaaatcatcagcatggcttcccgcgacgagaattttaccggctttcttcgggaggggaagcaccggagagtaggaggattttccgttcttcagcagcaccaaggacttcctgaccgcttcgcgcgcgagctcacggtgctc

SEQ ID NO: 39468 - DNA, 294 bp, Oryza sativa
  Clone ID: uC-osroM202016g10a1
tcgccgctgtttcccgcggcggaggtggcggctgcgtcgcccagcttaagcttctccatcagcgattccccgatgggttgctgcggcggcggcaacggctgtttcccggcggcgcgtcggaggatgtcggtggggaacgcggcgtgtggggaggagtcgtcgggggcacctccgggtcgtcgaggcggcggcggcggcggtggcggagtgttgttctcccggtcggcactgaagttgagggtgcggaggaaggccttgtgcttctgctcctgccgagcctcgcgtatcacccgg

SEQ ID NO: 39469 - DNA, 490 bp, Oryza sativa
  Clone ID: uC-osroM202016g10b1
actatggatagttcattgtatggtcacttgcttccaatccagggaaaacaatcccacctatacaatctgttgcaggctttgagcatagtcgctctgtcctggttctggtgctctaaaccttgtttaccattgtgatgcaaagagtcatggtcatcaagcagcatgtcttactctattggcaactaagctgtcagagtaaatttgatgaaagctcaaaattgtgtttgccagataaactgccaccagaaacttatggaaccaatgaatctgctatactcttcgttcatgagtggagcatgtagcctagaatttgtgtgtattcactcagcatttccaccattatccttgctactaatgcatgaaaaaccatcatcactggaaactagatcaatactttttgaaaggccaagaataagtgatctgcatgtctcactgtttgggacaaaacccaattccaacatcctgttctgcaattctaatggactcctgc

SEQ ID NO: 39470 - DNA, 66 bp, Oryza sativa
  Clone ID: uC-osroM202016g11a1
gattttatgtccggggaaggggttttgttcaaggtggggagggccccccccccccccccccccccc

SEQ ID NO: 39471 - DNA, 475 bp, Oryza sativa
  Clone ID: uC-osroM202016g12a1
tttttgttacaggaaactagtctattctaactgaaatattaacttaactttttatacattcagaacgaagttagctatactgaaaggtgaaacatcctatagcagtcaagtcacatagaatctggctagcataaacagcaatcataaacacattttactctattgtacattgtgaactacacggatatgaaggatttttgtaattaaaccataaaaacacaatggcttattcagcctgttggaaggaaaaaattctgcagcatcgacaagcatcacttctggctgctatcctcagacccatcatgctggcttgtagcaccgccatttggtacagcacctgccccttttgtagtggtatcagaatagggtctcttccttgatgatgacgatggtttttccggggtatcaatctccttgctcttctcacccccatctgcagccatgtttctttctctctcttggtgagaaggaatag

SEQ ID NO: 39472 - DNA, 242 bp, Oryza sativa
  Clone ID: uC-osroM202016h01a1
tttggggggactggcaataagccatatatttacaaaaacataagcctacagagagatacttctggtcagcaaacgcacgacagctgatcttcattgtgctacacggataagtccacatggtcaacccgccagcctctgaagtagaacgatccaacattcaacccctaaccagcaattttgcagactttaggttctgacttgagaccggaccatttactaaacgtgatgcactttgtctgaaa

SEQ ID NO: 39473 - DNA, 276 bp, Oryza sativa
  Clone ID: uC-osroM202016h02a1
cggcgtgcgcgcgcgcgcgtgctcttggactctatattgggggcgcccttttttttttttgggttactgcgaagaagcgatttttttacaaaagcatacgcctactgagaggtactaatggtcagcaaactcacgggagatgatattatttgggctacacggataagcacagagggattatctcgccaaactttgatgttggtaggcgccaacaatgggggcgaaaaccagatattttttatactttaagttgttgagttatgacgcgggcattta

SEQ ID NO: 39474 - DNA, 128 bp, Oryza sativa
  Clone ID: uC-osroM202016h03a1
aaggaccaaactctgggggagaggacctgaggattgcgcgcccttaaaacttttatattttccagtgagacgaacatcacctgctagcactttacctccttctcctgaaagactttggggcagagacc

SEQ ID NO: 39475 - DNA, 231 bp, Oryza sativa
  Clone ID: uC-osroM202016h03b1
acgttcgtttcgttggggctcgtgcatgccacgtcatacctatacgatagagacaactatatgtaagtgacaggacgtggtgctacataggtcgccactgagtagagctctgagcgcatacgaacttaagcggctggtgacacacgccgcctgatgccagcgtgggtaatgacctgtagggcaccgaccgttcggcttgccctgcaggggtgcagcctgaatggccaatgg

SEQ ID NO: 39476 - DNA, 344 bp, Oryza sativa
  Clone ID: uC-osroM202016h05a1
gccggccttttttcttcctggtggacccaatgaacaacgttaacatttgcagcgcgaaatacttattaatcaatgacatccgacactttgtcttaccaatcattaacagcaaaacttgtgatcaagcataaaaggaatgtgacaggggggccggataagactcaaacttggaatcaagtacctggccttaatggcaagtatacctggccgagaagtataacgcctaacatccaaaccgggaactggaaccaatcaaggcaaaccattccagggaaaaagtgacctgttgtcgataaccgtatgcaagatcacacacaactgcgagctaaaaagacagctacgac

SEQ ID NO: 39477 - DNA, 453 bp, Oryza sativa
  Clone ID: uC-osroM202016h05b1
aatcgaacgaaacttatttgttcctcatcttattctctgatgaaatttcaaaaggagagcgaaacagtggacactgacgcttgcgaaataaaaaggtggcgccagaaactccggcgagactacggcgacgagacgcccgacgacaacgaccatgacacgatacaaccacacactgggtggagattaccgtcggcgacggcgacgaacacgacggcgacgacgactgctcagtgcgacaggtacaatggaggaggagaaggaggtgcaagaactcctcgcgtgaacaccaagaagccggcgatggctgcctcggtcacacggtgagcccccgcatgaactcccactcgtcgtcatcctcctccgccgcgccggcggccgacccctccgagtcgctgctcatgccgctgctctccccgtggccattgccgcggcctccgggtcgaacgacaggta

SEQ ID NO: 39478 - DNA, 372 bp, Oryza sativa
  Clone ID: uC-osroM202016h07a1
tttttggttactggtaataagccatatatttacaaaaacataagcctacagagagatactactggtcagcaaacgcacgacagctgatcttcattgtgctacacggataagtccagatggtcaacccgccagcctctgatgtagaacgttccaacaatcaacccaaaaccagcaattttgcagacttcaggttctgacttctgaccgcaccatttactaagcgtgatgcacctagccagcaatttggcaatctgatcttcagaaaaatatacaggtgggtgagattggatccaaattttcgttcgcattgcatcaagccgacaaccattccagaagtggccaaagacaacacaattacacaggttcttgtag

SEQ ID NO: 39479 - DNA, 352 bp, Oryza sativa
  Clone ID: uC-osroM202016h08a1
gacaaacacttccaataacttcacaaatagcttcttgttacaggaacgggtcaacaaacacgcgcaatcaaactacagcaataattttggattcacacccacaccgtaatttacaatcacctgcaacaataacagataattacagcacccagtatggtcttatcatttcttcttagcagactgcttctcttgctccatctttgcaaataggcttccatcatagactgccctgacagtatccttgtgaagaaatccatccttggctttgcagaggtagtacaattctttccactctgtgaagccacccaaccatcctttgaaatctttaggctccctgtttgattggagcaac

SEQ ID NO: 39480 - DNA, 542 bp, Oryza sativa
  Clone ID: uC-osroM202016h08b1
ttttgattaggataaattaagccagcacctaaccataaagtaacacagacgcggatgaattgcttaacaaacaggagaactgaatcgcctttttcatgtggcatggtgatgcagagatttgagggatatcacccggccaaaaagatttgagagatatctgtttattaggcactttagttgtctgttccttctgtcaaaagctagtgaagatgcatccaaactatagttctaagagagatcacgcataatatgaaatcaaagatatggttgtttcattttctttagaacacttggttgttccattgcatgcatagtttaatacgtgtgaaatgcacatggtgaaaaaaatattgccactaagactcatggtatcacattgagatctataagcttttaggatcactatgcagtgaggctatcactgctgttgttttcttattgtttttggttcaatgcgaacaaacaaggcacttgtcttagctagagtcgtaaaaataatgcaatagggtaacatggatctagaattgctaccacacatatgt

SEQ ID NO: 39481 - DNA, 338 bp, Oryza sativa
  Clone ID: uC-osroM202016h10a1
ttttgtggggcccaaggaaaaagggtcaccaccacagggcgaaattaacagaaatcgatgacatccaaccatttttctgaccactcattaacagcagaaattgggttcgaccataaaacgaattcgacggatgggccgaataggacttaaacctggaatcaagtgcctggctttaatggcaaggataccaggccgagaagtataacgcctaacatccaacccgggaacttgaaccactcgggtcaaaccattccagggaaaaagcgccatgttgccggtaaccgcatccaggatcacacccaactgcgagctaaaaagataggtacgactgtgaatta

SEQ ID NO: 39482 - DNA, 289 bp, Oryza sativa
  Clone ID: uC-osroM202016h11a1
ggtcaccggactcgggcgttggcgagggcggaggcgccggagccgccggcgtgggcaccggccagcacttacgtggcgtgaggaagcggccgcggggccgttacgcggaggagatccgcgacccggccaagaagagccgcgtgtggctcggaactgctccacacgggcgaagaggccgcgcgctcctacgacgccgtggcgcgcgagtaccgtggtgccaaggccaagaccaacttgccctaccctaacggcgcgcccgccgtccgtgtgaacagtggcagcagtaaca

SEQ ID NO: 39483 - DNA, 472 bp, Oryza sativa
  unsure (1)..(472): unsure at all n locations
  Clone ID: uC-osroM202016h11b1
tctagatcgcgtgcgtccgcccttttttttttttttttttttttttttttttttttttttagcaaaacagagtgaaaagatgatttcttagaagggtttctacatagtttctcatgactatcaaaataataataatacatatataatcccgctccataacaacgccggcaggatatgtcttaggtgacacacatggggtgatcttctcttaaactacatcgccggcgaaaaaaactatttacaaaaatgtcttccctcagttaagcaagagggtctaggcataagaggtacacggaatttttctactactaaaaattaaaaagaaataaatgaactagcggtcatcatgtaaaaactccggctgctagacctccatcggcggcggacagttcagatcaagatcaaaagcgatggctttcttcnccaacgcggcgggcggtgatggtgccagatccacgatcgacgaggagtc

SEQ ID NO: 39484 - DNA, 350 bp, Oryza sativa
  Clone ID: uC-osroM202016h12a1
tttttggtttggtcaaagccaagctgcatctgctgcagggtttgtatagaagatcttgtattgtacagggttgagggttccaactccctttactagcactagttattattacatgatggaacatgtcatcatctcatttctgctctcttatacttaattaaaaaactctctttattaattaatcactggattaagctatatactctctgggtagaagcagaaacctgcatccacgaaaattaagaagaaatgaaccttaattttccaggggtaatcattaaatgaccctccttggtcttgtcttggatggatcagcagctctagcttgattgatacttggatagctgacg

SEQ ID NO: 39485 - DNA, 280 bp, Oryza sativa
  Clone ID: uC-osroM202017a01a1
ggtcattcagtagttcagggcttgctagaatatatttgtagcctttgtcctataaacagatttatacagcaggaagaaacggatattcagatgtttccctaccaaaacagctactggattcctagcagcacagcattgacagacaataaatagctttcccaatccaatggaaagtgtgataactgaactctgaacaaccaattacacagcttcaactgaggatgtcagctcagatgagcagagacgcgaagagcgccgtcaccatcggtagaatgccggc

SEQ ID NO: 39486 - DNA, 282 bp, Oryza sativa
  Clone ID: uC-osroM202017a02a1
gataaagaaaaatggaatgttgcaacacatttaacttgttcagtgttcaagctaacgttgaacctggtacaagtacaacatgctggcacgcatgtccacatctcgcgggtcgagggttcaagccgaatacaacacacggcatgttgcatttcatcataatttaaagtgcttagcatcactttgaacaaggttttggtggtcacatgtatattcgcaacctttttaaggtgtccgcaaaagacgtgcgcagcataatactttgcagacctatggttatcaaca

SEQ ID NO: 39487 - DNA, 493 bp, Oryza sativa
  Clone ID: uC-osroM202017a02b1
agttactttaggtgctcattccaccgccatcgggtgcggcgaactctccaccgccccctttcctacatcccaccactattgtataagccagcccttcatctcatctggagatctggttctactcatgcaggaaagccccagtctttatcatagcaaggaggtcatgtcggaatcggccctcgacaaacatatagtggtgaaaattcccgatcattttctgccagatgctttcataggagaaagtgttggtaaaggtaaagaagatggagcaaccgtagataacatggacccgtcccgcccttttctagttgataagacggctgatttggataacgctggtgagcgggttaaaataaaatatgcttggatggccaagtccttaacagatgatataatcatcccagaccctacccatcaggtggtgcgggatgccctcattgatatatctacccgcttggactccgacttgagaaaggacagagtccggtgcttc

SEQ ID NO: 39488 - DNA, 298 bp, Oryza sativa
  Clone ID: uC-osroM202017a03a1
ggagacggcgccggaggaacccacattgccctccgccgccgccgatggggcggctagtagcgggacaacatctggcgctggtgctggaacgggaatcaactcgaactcggtgctggtggcgctgctggactcgcattacacggagctggcggagctggtggagaaggccctgctgctccagacgctggaggacgccgtcggcaagcacaacgtcaccatcttcgcgccgcggaacgaggcgctggagcgtgacctcgacccggagttcaagcgcttcctgctcgagccgaggaacctc

SEQ ID NO: 39489 - DNA, 474 bp, Oryza sativa
  Clone ID: uC-osroM202017a03b1
ctagatcgcgagcgccgcccttttttttttttgggggtgtgatgtttaattggttactcggcattctgtcaaaacagaaaaagaagaaaaaatgacggaaaaaaatataaaaaaaaacgctcctatacacagaagatctcggtcttcaagtatgaacattttcctgcctttttttttttcagacaccaacagccaccagattacattccccacctgatttattattcgtaataataaacaaaaataaaaataaaaaaaaacaaatggtaatgtggacggctccagcacagtccatcacctcattctagttcgtgtgtcgggatcatgagatcaatctttcgccgtctactggcagcttgcgaatcgcaatcgctgaccaaggatgccagccatttggcacgttgcttctaacaacttgcctctccggagtttgttcttcttgcgagtgccggtgacggcgggcgccctcctgac

SEQ ID NO: 39490 - DNA, 306 bp, Oryza sativa
  Clone ID: uC-osroM202017a04a1
gctgacggtgccggtggaacccacatggccctacgccgcgccgatggggcggttagaagcggaacaacatctggcgctggtgctggaacgggaatcaactagaactcggtgctggtggagctgctggactcgcattacacggagctggcggagctggtggagaaggccctgctgatccagacgctggaggacgccgctggtaagcacaacgaaaccatcttcgagccggggaacgaggcgctggagcgtgacctggacccggagttaaagcgcttactgctcgagccgaggaaccttaagatggtc

SEQ ID NO: 39491 - DNA, 284 bp, Oryza sativa
  Clone ID: uC-osroM202017a05a1
attccatggctattgctaaccgaatcggattgtgtatggacgaaaattagatgtgacgaccggaaaaacacgaatatttatattagttatagattttacatgttaaatataactatatcttttgcatccatcaaaacatcacaaaaaagctgattccggctatcggttggcaaaagtgaagcacttattaactctctttattattttattggtcgatacttatcaactgcattagtgcaaagagataggtaaagtaatgggttttctagagattctgatgtgca

SEQ ID NO: 39492 - DNA, 304 bp, Oryza sativa
  Clone ID: uC-osroM202017a06a1
gagctcaactctgaatctgttgtgcaggagatggcagagagagttgatgagcttgttgataaggtcatgaacttggagctcaaattcccaaagcagtccgctcaaatcaagcagctgaaggaagataatgatagcctcaaagataggttggatgatctacaagatgagatagcacttcgagatgatccaagtgacttaagtgaacagctcaagttagcagaagatgagttgaacagagtcaaggctcttgaaagatctgttattgaggaagaagttcttgttagcacagtcttttctgaagttt

SEQ ID NO: 39493 - DNA, 368 bp, Oryza sativa
  Clone ID: uC-osroM202017a06b1
tttttacggaaccagggtttgtctttttttggaacagagggaggacatgtattctacagtgtctgccaactgcaagcaaagacagacaagttagctactgaaatgagcccaggagatatatgaacacatgtgctcaccggcatagaagaagaaaacaaaaaagaagtatgcgcacctcacagatcgctgaactgtttgtgaaacgtaggatttatgcaggcaaatattgatttcttcttcggctttgtgccgaataggaagttccgcaatggcactcttgttctagtcgggaagtgtttgaattggctgtggtagctggtgctgctgctttcttccttcaccaaagatgacctcctgcatgaaagatc

SEQ ID NO: 39494 - DNA, 282 bp, Oryza sativa
  Clone ID: uC-osroM202017a07a1
gttgtcatgatcaaacgcagaaaggatagccttatcattgcaccgcacatagattacagccttacaccgtcccttagataggagtagtactaagatgataacaaagtcataacccattgcctcaggggagctctctaaattctcatctgaagctcatacttttataggtagcagcatcaaaacaatgctcagtttgcacggcctctgatcacgtcgaggccaacctcagttggatcggtcgcctggagctccacctgaatgccgtcgagctccctcttgaac

SEQ ID NO: 39495 - DNA, 518 bp, Oryza sativa
  Clone ID: uC-osroM202017a07b1
attgttgctcatacgacatgcctaaaaaggcttgcttaattaactgatgacgagatgtgtgaaagggaatatgcatgaccagtcatcatgttgttattaactatttatgcgattttcaccctgatgtttggtcctcagtcacgttatcaaccttttgttctccataagcattattatcattgtctgatgtggacctgtgaagtgttcattacttatcaggctgtgatatatggacatctcgccagccgagcttgcgatcaacatagtagatcctgtcacggaattcagtttgttagacagcctttatcctgccaggcatttgcagtgaattgtgttttaattcagattgaatatttcagccaaccaattacagccaatcttactataaatagtcatggacaaatcatttactgctttctgcatcctcccctgtttttaattagttgctctcacatcatgtacttccacaaatgtatcaactgcaatattaatatatgtaacgaagcatgttgaattta

SEQ ID NO: 39496 - DNA, 286 bp, Oryza sativa
  Clone ID: uC-osroM202017a08a1
tttttggttttcacctaagtcaatattattgattcagctttatcttagatacaaactaactccgaaaattttttcaagcgccctttattttaaggacactgtggtcacactattgtctgtaagtactactgtctactatcagagaccaacagcaaccaaccacctcagaaagtggctataatctgcagcaaagaagtgtacgtgccggtgacggcgacgaacactcctagcagcagaattccggcgatggccaccatctccgtgcggtggatgccatcggccttgt

SEQ ID NO: 39497 - DNA, 278 bp, Oryza sativa
  Clone ID: uC-osroM202017a09a1
cacgcacgcacgcacgcctttccttccttcctccctcccctccctccttcccccacccgcttcccttgccgtcgccgccgccgccgaccgccgcgggaggggaggtccccggcgccatctcccagaaatggacgcctgtttttcaacacagcttattgatggagatggcgttttcaatggttctggattggagaacttcatgaaggaagttaaaatgggcgaatgtgggctttcatatgctgttgtgtcaataatgggtccacaaagtagtggaaaga

SEQ ID NO: 39498 - DNA, 453 bp, Oryza sativa
  unsure (1)..(453): unsure at all n locations
  Clone ID: uC-osroM202017a09b1
ctcaaaagcaaggggggtgcagtttcaagacatggacatacatttttcgtgtccatgcaatcaactgtatttagtagtgtagaatgcactgctgtgctcccctggcctccttgggttgagatgataaaaccgcaaatcttctatacaaccatcatataagctgttacaaaaaaaaaatgaaataaaacatattctacagcgtttgttacaaacaaactccctgggcccaaaatcccataaataacctctggctggggccattgaatctccgtacatcagatggggaagggcaagcttacaaaaactgcaaggcgcttcgggctccaaaggctcaccncgtgaaactacaactgctggggttttcagctaaaagctatagatgaactgatcagtgtgcaatcgggcttgaatattcgggtccactctcccaagaggttatgctgggatgaccct

SEQ ID NO: 39499 - DNA, 208 bp, Oryza sativa
  Clone ID: uC-osroM202017a10a1
tttttgtttacaagtcaaaaatagtagtagtagtatacataaggtccacaacatcagctaattaagttactccttttttggcttattatttcatatgcactggtgttaaaattcctgcggcggaacaagacttttgctttttcggctggaaagattgtgttgtgctgctgatgcttcatggaaagattgagctatccccacgcgtccg

SEQ ID NO: 39500 - DNA, 292 bp, Oryza sativa
  Clone ID: uC-osroM202017a11a1
ttttggtttttatacacggaaagcttttaacaccacaatcatatgctacatgtaaactttgtccaattacatgaaattacagtggatggccaacgaaaactttgatctcctagaagacatgcgatggctatggtaatgtggcatgtactacacatctctatagaaattattaagaaaacccttcgttacaaccagctctgcacccaaacccactgatttcaggacgtgaagagtgggtgttaaaatgttgcaggacgaaagagtcacctatattgcagcaaaaaagaagccg

SEQ ID NO: 39501 - DNA, 441 bp, Oryza sativa
  Clone ID: uC-osroM202017a11b1
tgttaattggaagattgcatacaattgctgatggacagcaatcgtatacctgaagctgcgttaatggcacgttcttatcttcccagcaaagtttctgagatagtagcaatatggagaaatgacctcagtaaagttaatccaaaagctgcagagtctctggcagatccttctgagtatccaaatttatttgaagactggcaggttgcacttactgtagaaaagaatgttgcttctcggagggtccattatcctcctgctgatgagtacttgaaccatgctgaaaagtcagacatgactcttgtggaagctttcaaaaggatgcaggtcattgaagatgaggaaacagaagatgcactagatgaaaatggacagcccgatgaagaggttttggaagagaacaaagtggacgagagcacagatgaagctgtcgaagttgatgct

SEQ ID NO: 39502 - DNA, 464 bp, Oryza sativa
  Clone ID: uC-osroM202017a12b1
ctccgtttcttgctccatccatctatccatccaaggagtgtggaacgccacacgtattttttttttatctatgctaatctgatcattagcagaggagagttttagcagtaggattggattaaattggagtagtttcatagtttgtgtgtagtgatcttaattagctttgattagacagacagtacagtagagtagaggatgttggctgtgttcagcggcgcggtggtggaggtgccggcggagctggtggccgccggcagacggacgccgtcgcccaagacgcgggcgtcggagctggtcggccgcttactcggcgccgccgagccggccgtgtgcctgcagctcggcgaccttggacacctgtgctactcccacgccaaccaatgcctgctgacgccaagatcctttgcatcaaaagatgacatgttctggctgtttgagggagtcctggacaatctgtgcag

SEQ ID NO: 39503 - DNA, 281 bp, Oryza sativa
  Clone ID: uC-osroM202017b01a1
aaaacaagacttcatcttcattcttataaatgcatatccagtttatctgcattatggtacaggaatcccactttgttgcactaaactaaactatcatcatcatctggttggacaaaaaaacatgtcgaacaaaatatgtcaattcactggctaacactttctttatcaaacaccatgatttatggtaattaaatgggtcagtgcatgacatcacatatatacatgcagtcgaaaaaaatatatggagactttgggggttctgttaaaaatcctgtaagatt

SEQ ID NO: 39504 - DNA, 269 bp, Oryza sativa
  Clone ID: uC-osroM202017b02a1
ataggatcaaaacatttctattaccacaactttttaaggatggaatcgagtagcaatactttcaccccaaaatacagtttagcgacaatatcttagaaaagccgcttgctttgccgccatggctggcaagctgagcagagcagctaacacaaagaacacgagatcactataaaccaaacggcaacgaacgaagaaaatacagggtcttttttgtctgaagatacacgaagcggttcgttttcttttatttttagtctcctctcctcctc

SEQ ID NO: 39505 - DNA, 528 bp, Oryza sativa
  Clone ID: uC-osroM202017b02b1
ccttctcctccggctcttcttcagtatcgaatgctgtcttctcctcgtgcccaccaccaccaccgtagcaatggcgggcaacgggccgatcaacaaggaggacccgctcaactggggcgcggcggcggccgagatggccggcagccacctcgacgaggtgaagcgcatggtggcgcagttccgcgagccgctggtcaagatccagggcgccaccctccgcgtcggccaggtggccgccgtcgcccaggccaaggacgccgccggcgtcgccgtcgagctcgacgaggaggcccgcccccgcgtcaaggccagcagcgagtggatcctcaactgcatcgcccacggcggcgacatctacggcgtcaccaccggcttgggcggcacctgccacctggcgaccaaggacggtcccagcctgcaagtcgagctcctcaggcatctcaacgccggaatcttcggcactggctccgatggccacacgctgccgtcggagacggtgctggcggccatgctcgtgcgcatcaacac

SEQ ID NO: 39506 - DNA, 281 bp, Oryza sativa
  Clone ID: uC-osroM202017b03a1
acatgatgataacatattcatctaagattatgccaaatcaaaatctccaatggtacagcacaatacattgctaaatgagggaactactctcgtttcttgcagatctcatcttgtacccagtacacaacagacctaaccctaaacactattgcaagcacaaaaccaaaccagactgaacattctgaaacaagaactactttcctttttcaccacccaaagtgtagctgattccacattccagtaaataatatataagagattcagacagagccttatcacca

SEQ ID NO: 39507 - DNA, 284 bp, Oryza sativa
  Clone ID: uC-osroM202017b04a1
ataattgtccaggtcatatatcatgtatttaacacaatacaacaagcatggtattgattggaccctgcaaatactactcataaatagcaaatttattccaacctactacacatataatatatattatatgaaggccttcatctcatcttggaactccttgatacacttgttctccacacactgtgtcataatccgggtccctttctttggcattggtggagcaccaagcactgcgactgccatgtagtctgcataagtgaatggtatgatgtgattaggtgtac

SEQ ID NO: 39508 - DNA, 437 bp, Oryza sativa
  Clone ID: uC-osroM202017b04b1
gctccaaactggtgcgcacctacacccgcgcacacaacacagacacggacgtacactttgcacctctctcaccgcacgtagtcgccatggtcgctgtcaccgtgatgaggaagtcccggaacttcgtcgggccgtctcctccgacgccgccggccgagatcacgacgacgctcgagctgtcgtccatcgaccgcgtgcccgggctgcgccacaacgtgcggtccctgcacgtgttccgccgccacaagaacagcgggcccgtcgtcgacggtgatagcaggaggccggccgccgtgatccgcgcggcgctcgcccgggcgctggcggactaccccggcgttcgccggccgattcgtcggctccctgctggccggcgacgcctgcgtcgcgtgcacccgcgagggcgcgtggttcgtggaggcagccgcggactgcag

SEQ ID NO: 39509 - DNA, 266 bp, Oryza sativa
  Clone ID: uC-osroM202017b05a1
agaaccgaacaaaccctagcaatatataatttaaaaggcataatggtttacatgtccggacaaactgcaactcagcacactcctgacgaaactcaaaaccagacgggttcaggaatgtgttgtgacggctttgcagaagcttcgactcaggctatacaagtagcaaaatgttgcacaccatactaaaagatgcaaacactacatagtagtagcctgatgaaaaacgcagacttcaaagctttaatccctgttacagacgtagtgat

SEQ ID NO: 39510 - DNA, 291 bp, Oryza sativa
  Clone ID: uC-osroM202017b06a1
ggaaacaaattgagaagctgtctcaactcaattgcaaacagattatcatcagtcactgagtttacacacactgccataaaagaaaaacacaacttaaacaagaaggcatgccatctctaaagcacgcagtattaaacaacaggaacaaagcacacaacaaaggtcatcgctcctagtccttatcaggcctgctcctcagcttccgcagcttccctctcttccgctgcggcagccatcagctcatcaaatttctcgctcttttctaacactatctcaatcttagccttttgg

SEQ ID NO: 39511 - DNA, 488 bp, Oryza sativa
  Clone ID: uC-osroM202017b06b1
gcgagccgtacaacccaccaccaccaccaccaccgatctgcggagagcgagctaccaccaccgagcggcgtagcttgagcgatggcggtggaggagatcaccgagggggtgaggaacctggccgtggagggggagcccgcggcggcggcggcggcggcgggaggtggtggtgagggggcgcagaggagggcggccgggagcagcagcaaccgcatgcaggtgtgcaacaccaagaagccactcttgttctatgtcaacctcgccaagaggtacatgcagcagcacggagatgtcgagctctccgcgctcgggatggccattgcaacagttgtaactgttgcggagattcttaagaataacgggtttgctgttgaaaagaagattagaacatctacggtggaaataaacgatgaatcgagagttcgcccgctccaaaaggctaagattgagatagtgttagaaaagagcgagaaatttgatgagctgat

SEQ ID NO: 39512 - DNA, 265 bp, Oryza sativa
  Clone ID: uC-osroM202017b07a1
ggtgtcaaactttagtaaatacatcagaaatcctgctaaaattttagcaatattatcaacttgccaaaattttgacaatgttaaaatttgataaggtttattttgactacaaaataaaatccaatagccatgggccagccgcctttcccgttgctggtgtccaccgctgcccctctctctacctatctaccgccggggatctgggcccccccgatgcaccggcggtggcgggcaaggcgcgcgaggtggcgagcatgggcgcctt

SEQ ID NO: 39513 - DNA, 263 bp, Oryza sativa
  Clone ID: uC-osroM202017b08a1
gggaatctccatccatagaagggaactatatattatatataagtacttccaagttccaacaaacagccacacagccacacaggtgcacattcgggccattatttagaacgcacaaagctgatatatagcatgcagccatgcacgcatgcagatgcaggagcatgacagacccagtgtcagccactccagtacatagggctacaattacaactatatatacgcgaccaatccctaaaccgagcaagctatatgctgcttcaggc

SEQ ID NO: 39514 - DNA, 278 bp, Oryza sativa
  Clone ID: uC-osroM202017b09a1
gacacaaaacacttaggtagttggaagaccataacatcaagaactctccttgaaaattttgtaatttgatccgcaacgattcagatgcagatgaaacactgctgattcccactcagattacacacaatacaaatacaccgacaaactgcctcaaaaaccaccaaattgattcaaaagtaaaacgggtatgagggatcttcccaccgagactgactaaacctaaccacagacaattggatccactggacccagattattcaaaaacagatggctatgac

SEQ ID NO: 39515 - DNA, 460 bp, Oryza sativa
  Clone ID: uC-osroM202017b09b1
ctcctcctcctctcttccatcgccgctgctcgcttcctccccctctcccacgaaagatggcgtctcacattgttgggtacccccgcatgggccccaagagggagctcaagtttgccctggagtctttctgggatgggaagagcagcgctgaggatttggagaaggttgcgaccgacctcagggccagcatctggaagcaaatggctgacgctgggatcaagtacatccccagcaacaccttctcgtactatgatcaggttcttgacacggctgccatgcttggtgctgtcccagagcgctactcatggactggtggagagattgggttcagcacctacttctcgatggctaggggcaatgccactgtccctgccatggagatgaccaagtggtttgacaccaactaccactttatcgtgcctgaacttggtcccaacaccaagttctgctactcttccca

SEQ ID NO: 39516 - DNA, 286 bp, Oryza sativa
  Clone ID: uC-osroM202017b10a1
attgtcaagaaacctcgacaaccgattccataaaattcaatcaagtacaagcccacatatatagtatacagtacatacatgaaagaatgacaaaatatctgtacgccatgcaaaaacgtacaatcaacaaaatagcattaaacacacactgacactcatcgtgcacacatggcgaagcgagctacgtttaggccttgggtggtggcgcgaggaatggcattggaacgttggggacggcggccatcggcggcagcgccacctttggcaacgccggcacgacggcggc

SEQ ID NO: 39517 - DNA, 390 bp, Oryza sativa
  Clone ID: uC-osroM202017b10b1
gttaattagaacactgaatatattagctgtgctgagtgtagctagctcagtgggcaaagcaagcaatatttcaatggcttccagctcgaacttgctcgcgatggccattgccgtggctgccgtgctcctagcgggcaacggcaacaccggccacgcagcgcggcgcctcgccgacacgaccgaggcgccggcgccggcgccggctgccgccattcctgctgttccggccatgccgaaaccgacgatccccaccatcgtgccggcggtcacgttaccgtcgatcccggccgtgccaaaggtgacattgccgccgatgcccgccatgccgaccgtgccggcggtgaccatgctgccgatgcccgacgtgccggccgtgccggcggtgactct

SEQ ID NO: 39518 - DNA, 297 bp, Oryza sativa
  Clone ID: uC-osroM202017b11a1
tttttgtttttttttttttacccccaactcacaccatcgatgctcagcttcaatacaaacttttcaacttttttctatggaagaagctgcatcggggagtttttaatacccctattttcgggagcagttacgcccaattaaacatccctcacgcttctcgaaactcgaaaatcgctcaacaatcacatgaccacaacaccaccaaccaacaaattgaagtctcccaatcaatgcatcaatgcagagtttgagaagatgcggtccaatttgtgggcgagcagccgaggacgatggcga

SEQ ID NO: 39519 - DNA, 290 bp, Oryza sativa
  Clone ID: uC-osroM202017b12a1
agaaacaaacagctgctagggctccgcaaatacaatcaaatgaagtcaaccctttcattagggttgtatatcaaatacattcctaaccatttcttcggtagaggtgtttacaggacagcagctatgcatgtacatcaaaggtatgatagaaagatttctaacattcatcctgtcgatgctttgtcacttccatttgtctacaacaataatgggattcttcaaaccaaaattcccatacttccaatttccaactacatggaaaagtataaaataagtgaatctgagcacgt

SEQ ID NO: 39520 - DNA, 280 bp, Oryza sativa
  Clone ID: uC-osroM202017c01a1
caaagggcatacaatgtatttttgcgtatatagacttgcagttgcaaaccgaattacatgcgtggtgtcgcatagacgtgcaaattccacaggctgaggctttcctttctgcatccaaccaagccctggggtaatacatctggtcgacaccacaaaaccatgtgtcaactcaaaatatgtcagatttcactccgggtacacaaatggaacacttacaggttacaacaagtataccagcgaacaggttgaacttgattctaatacactatgtgagctacaa

SEQ ID NO: 39521 - DNA, 199 bp, Oryza sativa
  Clone ID: uC-osroM202017c02a1
aaataaaccatccttaatcttggcgggcccaggtggtgccttcccctcctttttaatcgaacagattaatttacatgacgggtacctcacgttggggggcgaataacccgcgcttaatgctggcgaccggagcctgaccggaactgaaccttttacccgggggtggtggggtcattacaagtggcctgattacctggag

SEQ ID NO: 39522 - DNA, 279 bp, Oryza sativa
  Clone ID: uC-osroM202017c03a1
accaacaaccacactgttacttcagagaagaaccaaaggtaagtgcccctagtatttacatcgatgctaacatttgagttcctcctatgaaattcaggagggcatgctaaccacagatcacagaatatgtcattgcaaatggtcaccagaatgctggttgaaattagcagagatcgatcgggactcgctctgggttctgagctctttcttgaccctcagagagcttgacaccaagctggcctttgatccctcccccaaaggcatacagtttaccggatt

SEQ ID NO: 39523 - DNA, 285 bp, Oryza sativa
  Clone ID: uC-osroM202017c04a1
gctgtaaatttgcttgattaccaccgttaccacataattacacccgacgcaatttcaaacacgtacaacgaatgctgaaacaatcccagcgttcactaacacatcctacacaaagaaggttcagatagacgaccgatcgatctacagtagattgtacaaaagaaaaattggacgaaatggaaaacccaaattcaaattcgaatgaagtatgcatcaaaaaaaaaaaattcgagcattgcatcgacctcatattctcaatgaattctcaagcctgaatcgactgaa

SEQ ID NO: 39524 - DNA, 259 bp, Oryza sativa
  Clone ID: uC-osroM202017c05a1
gcgctctcaaagtagcatatattattcaatcttgatgaaagagggacacaagccatcatctatagggatggggccttttacaaacttcaacacacggataacaagcatacactcaagagtcaagagggggctaggttttgtgtgtacaatggaacacgcaggcatgtacacaaccaagtatactccaccccaaactatagtctttgcaatggttttggcagttgctcaaaaaccatgaatcttgatgtgttccttcttc

SEQ ID NO: 39525 - DNA, 271 bp, Oryza sativa
  Clone ID: uC-osroM202017c06a1
aattacatgcatgcaatggcctacaggcctaggatctaacgaacgatgaatctgcaaaaatataatagcagctgctaatatcacgaattcaagaaatcatctcccatcactcttgttgccatctggttgcagctaactcaccctctttgttctgactgataccggcacgctcctggtcagaccccgcggtttcacctcgctctctgcagtgatctcatggcggaccacttcatcatcctcagctgaatcctcgatctctgaactgtagttc

SEQ ID NO: 39526 - DNA, 279 bp, Oryza sativa
  Clone ID: uC-osroM202017c07a1
gcaactcataacaggagcctcctcatcttccatgatgtttaacatgcaggcatgtgatgtctcctgtttgaactcatggtaaaaggactgaaaaatggagacgtgagtatacggttgcaacaagtatgacagcaagatgcgcatatttacatcgatttcttgcccatcttgacatcttattcacttgatatgggttcctcatttcttcctagatgatgaggatgaagaagaagcggcagcgatgattccaccagcaacaagtcccacaagtccgaaggc

SEQ ID NO: 39527 - DNA, 279 bp, Oryza sativa
  Clone ID: uC-osroM202017c08a1
aaaaagagagagagaaaaaaacgctcttaattgatccgttcgcaatttgcattgcaatcacacacacacacacacacacacagaatcgtagtacagtactagtgccgaactgccgatcggtagaatcaaaattcgttcttgaccggcgacacaagacgacgaaggcattgcatgcacataggtagatcgatcgatggatcaacggaactggactttggagccgtagttggtgttggccctccagttggccgggatgacctggtgggcgatgacggtctg

SEQ ID NO: 39528 - DNA, 274 bp, Oryza sativa
  Clone ID: uC-osroM202017c09a1
gattgagaaccttaaaacagaatggtattccttattgaacttcctcaaggactagcagagtcaaaatgtagcctgcaaagtttagctgcaatttgcaaaaagattgccggttgccaaaagttgagtcactcgtcgagttctgtatcacagatgatcactagtgcaactacagagaggaccaagtgttcctcacattgtctggtagactgacatctgctaataacctagaacatggtgcgagaatgacttcatttcttcgacttgtttgccacgg

SEQ ID NO: 39529 - DNA, 283 bp, Oryza sativa
  Clone ID: uC-osroM202017c10a1
attgagcagattgagtacattaatttttagattgaacaaatatacaaagaatcaaatgaatcaacactcctagaaccatatatgtcccttggcgacaatcaatcttggaagatccatggtcaccagcttagcttgttgcatactcgatgacagaaaccaaacaattagtgagttgaaaagaaaaaaaaaatcaaagaatagactctgttcaatagagtcgatcaatgggcagatctcttgtttttacaagatggcgtatgatgaattagttggacatcctgag

SEQ ID NO: 39530 - DNA, 257 bp, Oryza sativa
  Clone ID: uC-osroM202017c11a1
caggcaaatgcatgcacagttttacagaagcaaagcaacgggttcccaaaggtccacacttacagtacgttcaacgtacaactgatccaagcaaatgaaacaggtttgatgatgcactgatgcgagaaactaaacggttggatcggagtcggagacgaggcgatcatggacaagcggcggcggcggcgatgagcttagtagtcggtggtggggagctgctcgtgggtgtgggagatgaagaggaccttgtagatgac

SEQ ID NO: 39531 - DNA, 286 bp, Oryza sativa
  Clone ID: uC-osroM202017c12a1
aaagacaaattccttgctcatagtgccatttacattttacagcaaacaaaagctgatcatcagaactgatatacacatgcatatttccttgtcagccaggcccatatacaaatacactgcacacgcactcagcatcaggaatcagaataatttacatgataattaatggacagtacttgcttttattagtggcgatttgtttatgtgcgaatggattaggaaccgattacgccaggactgacgttggctggatgatggagtccagatcggacctcattcccttcgt

SEQ ID NO: 39532 - DNA, 276 bp, Oryza sativa
  Clone ID: uC-osroM202017d01a1
gggacagcagtttcacacttccataagattgaacagtgttattaccctcaaatacaagtaaataagaagcagataagccctatggatataatggcagggtttccatgtatgaagttggtgctgtaaaccttcataagccataaaaagctcaaggcgtatcaactaacgcaccgcgaaagcacgagaggttcctgtaaaatgcctgaccgaaccaaacattggtttggaggcaccaaaatgcctcaatctgtaaacaccagcagcagcgtcttcagg

SEQ ID NO: 39533 - DNA, 278 bp, Oryza sativa
  Clone ID: uC-osroM202017d02a1
aaccaaaacataggaggtttcatttcttcttctcaaagtagtgtagcatctttccttctttcaccattacataagcttaagcaataacagataacaaatcctcctcctcctctaggtaaaatattcaaacacaatacccttataagtacttattattaggaaagtagcgtgcatgggcataaatggcagcggggggcaggttaagaatcacaatgctgagcagcgaggaaacaaaacaccataatgggacagagcaaaagcctccgaaagggagcttt

SEQ ID NO: 39534 - DNA, 278 bp, Oryza sativa
  Clone ID: uC-osroM202017d03a1
acatgataaaattattattgtcttgaattatgtaaacgatgataacaaatccttttccagctacaaaagaaccagcataacaacaaagaattataaagttgcttaagtaatctctcccttcatctcaaaaagagctatatctagggggcctaggccacagcaacactttcacttaaagggtactttccatcctgcgacacacaagctcccaggatcaatctacttggccttgccgttctcgacagcagcagtcgaggggttcagctcatcccaggcct

SEQ ID NO: 39535 - DNA, 262 bp, Oryza sativa
  Clone ID: uC-osroM202017d05a1
ggaagagtataagcaagtaattctttgatgcaaagagttaagaacaatgctttcactggagttccaaagaaaatgaatcaatgtgtcaaacaaagcagaataatttcatctgtatgaagtctatgactggagtattatcatttatctcccccaacttcctgatactacaataccctcacgtaaatcaatggcgatttccttccatccatacacccaattgcaaaagatgcaacacaatcctgaatccaaaatgtaaaatgta

SEQ ID NO: 39536 - DNA, 317 bp, Oryza sativa
  Clone ID: uC-osroM202017d05b1
ggggggagtataagcaagtaattgtgtgatgcaaagagttaagaacaatgctttcactggagttccaaagaaaatgaatcaatgtgtcaaacaaagcagaataatttcatctgtatgaagtctatgactgtagtattatcatttatctcccccaacttgctgatactacaataccctcacctaaatcaatggcgggttctgcctcggctcggccttcaaccccacgttccacgcctactttaacacctttgccgggctgggcaacgcccttggtgtgttcgtggagtaccgactggggccggagcaccccggcccgg

SEQ ID NO: 39537 - DNA, 279 bp, Oryza sativa
  Clone ID: uC-osroM202017d06a1
gatcaaagaatagcacatcagttttagctacaacaaacatatatccgaaatcgtaattctgaattctcatcttcactttcacctatagtagtagtagtatgacttattctactagacatataccaaacgacgaaggatggatcgaactatgcaactctgaatttcttcttcatcatcttcctcagtgtccaaggccggcagctctaccgcagagtatggcgttggtcgggatactgtactcattggagaagctctgctgcggcgtccacactctcatgt

SEQ ID NO: 39538 - DNA, 272 bp, Oryza sativa
  Clone ID: uC-osroM202017d07a1
cgaacaaagaatgtcaacacacccatcagttaacatgtgagagaagcaaagcaatttagtagagatccaacatccattacatcactaactggacagacttgttcggaattagtacataggaacttgagagcaccaatgtgaagggaatgaaaggcgaatacaagaaattgagcaggtaacagcttgatatggaacaggggggaataaaaactgtaaccgtaacgtgtgcagattagctaagcacaaccaccatgtaaccagcctatagtgca

SEQ ID NO: 39539 - DNA, 272 bp, Oryza sativa
  Clone ID: uC-osroM202017d08a1
caagaaaaaactttcatgtaaaagtacacaacaaggtcgaaatttggtgtcaacaaacatgtgcagcagccacgaaactacggtttaaaacacctccattttctcatctatcgtctgcaaaagttacttgtgaagggctaccctcaactgtctcattctagatcctgaaaatgattaactagagttcaagggcctccaatctatttcttcttcttggatttgcttccctgtgcaaatgcagtgccctccagccactcatccatgttggcatc

SEQ ID NO: 39540 - DNA, 298 bp, Oryza sativa
  Clone ID: uC-osroM202017d09a1
gcccccaacggccacaggtccgactggatcatgcacgagtaccgcctcgagaccaccgagacggccccgccgcaggaagaagggtgggtggtatgccgggtgttcaagaagagattacccacaacaagaagagattcagaccatgacgcaccttgcggcagctggtacgttgatgaagatgcaccgggcgccttcatgtctccgatgatgatcaccagatcatcaatattgcgcccacaccaacaccacgccggcatcacgctgcaagagcaacacctccacaccacttacaagcaca

SEQ ID NO: 39541 - DNA, 425 bp, Oryza sativa
  Clone ID: uC-osroM202017d09b1
gggtgggttttttttttttttttgtttttttttttttttttttttttttttttttttttttttttttttttttttttttccccaagggcaatatttttataaggcgcccccaaaccccccccgggggaccaggtagagggggcttatttcccccgcataaaaatggggcccaaaccccttggatcgatccgcccaattggacccaccccaccctaaacattattgggaaaattttatctataaaaaaaaaaaaatcctgaaaaaaagggggcgggggattgaacatgcaggggaccaccccctccatggatcaaattgggggcttgaccttggtggggacccaaaaagggggggggcccccctttggtggttggcactgacccgaaaaagggcccctttaacaaaataaaaaaccccaggcttgg

SEQ ID NO: 39542 - DNA, 278 bp, Oryza sativa
  Clone ID: uC-osroM202017d10a1
agaatcaactgatatatagatttgcatagcaagaataagtttctcccataacaagtgattcatgcccagacccacgcgtcatacaaagctaagtctatgaagtctgatactcaccacaaaagaagaattctttttctgttgcaaataaaaaaagagtttaacaatcataacaaacaccccggagcccagttgcaatggcaattttaccacgatagtgcaacgtgtacttcatcagtttacatgttttcgagctctgctagattactgccgcctgtgcc

SEQ ID NO: 39543 - DNA, 199 bp, Oryza sativa
  Clone ID: uC-osroM202017d11a1
aaaataaaatatttttaaaattaaatataaaaaaaaaaaaaaaaaaaaaaaaaaaaaaaaaaaaaaaaaaaaaaaaaaaaaaaaaaaatttaaaaaagaaaaaaaagaccaagaaaaaaaaaaaaaaaagaaaaaaggccggggaaaaaaaaaaagaaataatggaaaaaaaaaaagaggaggaaaaaaaaaaaaaaga

SEQ ID NO: 39544 - DNA, 276 bp, Oryza sativa
  Clone ID: uC-osroM202017d12a1
accacaactttttaaggatggaatcgagtagcaatactttcaccccaaaatacagtttagcgacaatatcttagaaaagccgcttgctttgccgccatggctggcaagctgagcagagcagctaacacaaagaacacgagatcactataaaccaaacggcaacgaacgaagaaaatacagggtcttttttgtctgaagatacacgaagcggttcgttttcttttatttttagtctcctctcctcctcgatgatgggtgtatggcaatggcaatggc

SEQ ID NO: 39545 - DNA, 272 bp, Oryza sativa
  Clone ID: uC-osroM202017e01a1
gactaggaaaaaacgaaggaactcaggcaaatgcatgcacagttttacagaagcaaagcaacgggttcccaaaggtccacacttacagtacgttcaacgtacaactgatccaagcaaatgaaacaggtttgatgatgcactgatgcgagaaactaaacggttggatcggagtcggagacgaggcgatcatggacaagcggcggcggcggcgatgagcttagtagtcggtggtggggagctgctcgtgggtgtgggagatgaagaggacctcg

SEQ ID NO: 39546 - DNA, 271 bp, Oryza sativa
  Clone ID: uC-osroM202017e02a1
atccaaatgtaattttttcaatcctacatggcatgccatgtgtacaaagtatgctcgcgtggatagttagatgggtaagtgactcacttacctcatattagtgacccaaatatgtattttaaaagtagagtgacctatatgacacacttaaacaagtttaatgacccatcatgtattttactcttttttttaaggggaagtaactctgtcaagagagaccagagtgacgttcgctttgtagatatcctccatcgtaatcgtcagcactcgt

SEQ ID NO: 39547 - DNA, 256 bp, Oryza sativa
  Clone ID: uC-osroM202017e03a1
aagcatgggagaaagacaaaccgacaacacacatgcataatcgtatatacaagatggcgaggggcaatgtattgtccatgcaaatgctactttaagaaaagcagggagagctatctgatctgatactctggaaaagcagagatcagctatctaattatacatgctgtccatgtctattgggagctcggggcctacatatggggcccctgcaacacggaaaccgtcaggcaagtctgccttttccagtactgcaaaa

SEQ ID NO: 39548 - DNA, 273 bp, Oryza sativa
  Clone ID: uC-osroM202017e04a1
gaatctaatgggggtttggtttgccgacatatggagctccattacatacatgttattgacatcaaccggtcatgtaaaatctccagaagtcgcatggttcaaatgtgtatattcagtttggactatgaacggatgcagccatccgactgcgactaaagaaagaaggggattgacacctcatggtggatctacaaaatcagcttacactagttgagacttgggaagacaccattatgctgtggtacatactcctggccattgggaagaagacaa

SEQ ID NO: 39549 - DNA, 298 bp, Oryza sativa
  Clone ID: uC-osroM202017e05a1
gtcgagcggttcatgaacatccccccgctccccgccggcaccgaccccgccaccggcgtcacgtccaaggacgtcgtcgtcgacccggccgtcggcctctgggcgcgcctcttcctcccgcctggcggcggtgctccccagggtaagctccccgtcgtcgtgtactaccacggcggggcctacgtcgtcggctcggccgccgacccgttcacgcactcctacctcaacggcctcgtcgccgaggctggaattctcgccgtcgcgctggagtaccgcctcgcgccggagcaccacctcc

SEQ ID NO: 39550 - DNA, 371 bp, Oryza sativa
  Clone ID: uC-osroM202017e05b1
ggtggttttttgattcgaatagaaatttccaatttgttcgatgatttccaactcttgaagaataagatcggcaattggcacaaaagatgcctgaactgacgagcgacaagctacaggagccctcgagctcaacaatggcggcatcacaaagcgccagaattattccatcatggcgaagccttcgcgtcgtggaggagcttcacttgcggaggaagctgaggatgcgcgcctgcatctcccgcgctctctcgcagcgcggatccatgcagtagaagacgtggccctcgcccatggactcgaggaggtccacctcgcctgcgtagcccctggccttgaggctctcgtagtaccagacgcccctgtcccggagc

SEQ ID NO: 39551 - DNA, 265 bp, Oryza sativa
  Clone ID: uC-osroM202017e06a1
ggcaaacccaacgaatcactcctttgcaatttatatacgtgtcaacacacacattttcaatcgatcgtgtatacacactttacaaatggtgcgtagtcgtcgccgatgaagtgccatttttcttagttgcagacctcacactgttttcggatgtggtccttgccgccggacttgacccccacgcgggcgagcttgactatggtgaacaatatagtcttgtagaactgcggcgtgctggccgccagcgagtccaccgttggccggg

SEQ ID NO: 39552 - DNA, 276 bp, Oryza sativa
  Clone ID: uC-osroM202017e07a1
aaaagagaaaaaatactgtacattaatcggatcatgctttggagttcttcagcttagatgtatttgccacaatagaatgtgcagagaacacgaaaaaaaagaaaaatctgatttctgaacgttgatgagagcagcagaatcgatcactgtgtgaatgtgaagcttaggcctcgaggacttggcaatggaggacgcggttcttggcgcggccgcggccaccggcgatggcggagaggagattcgcgacgaacgccttcatctgccccttgccgacga

SEQ ID NO: 39553 - DNA, 265 bp, Oryza sativa
  Clone ID: uC-osroM202017e08a1
cagtaatacggatgaagctcctgaatagggtgtcactggctcactgctttcgctgatttcaatacggtatccacccagaatggatggttaacacttaggtgcacaacaacacaggagattaccattacatgcattgttcaaactaaccaaaattgatggttctcataacagagtaagctttgacacctactttttactaaacctccccttcttcctagcttttcttttatctttctggatcttcaagtgaagttgtaccttctta

SEQ ID NO: 39554 - DNA, 499 bp, Oryza sativa
  unsure (1)..(499): unsure at all n locations
  Clone ID: uC-osroM202017e08b1
gcgccccaaaaccctagctcgagcgctcccttgttgcccccacctctgcggcggcggcgggcggcgagatggcgaagtcgctgcggtcgaagcgggagaagcggctgcgcacgctgcggcgggagatcgcgcagcccttctacgacaagaaggaggcggccaaactcgccgcgcaggccgccgcgctcgaggcgcccgcgctgccggtccgcgcgcctccgccgccgtccaaggattccggcggctcccgcgccgcctccagctcggcatcggcatggacgttgagatggcggatgaaggaaataacaagtccaagtccttcttgaagccaattggtagcattagcaagaagaaggtacaacttcacttgaagatcaagaaagataaaagaaaagctaggaagaaggngaggtttagtaaaaagtaggtgtcaaagcttacttctgtatgagaaccatcaattttggttagtttgaacaatgcatgtaatggtaatctc

SEQ ID NO: 39555 - DNA, 275 bp, Oryza sativa
  Clone ID: uC-osroM202017e09a1
cttcagccaagatgtaaagagtttttagtaatcagtaataattcagtaccccgtggtgtgcctgacactacagtggggtagttaacttatgctatatctgatgaaattgtccacaaagtggcatttcagtccaatacactgtgacgaatgatctcatgaggcaaaatagaccaaattcagcattggagatcgactgccaacattgctgatcattcaggaagcgagtagagttacaactcaggttcttcaggtgagcatgtgcctttgcaaggggc

SEQ ID NO: 39556 - DNA, 528 bp, Oryza sativa
  unsure (1)..(528): unsure at all n locations
  Clone ID: uC-osroM202017e09b1
ctcctttctctcggaggagaggggaaaggaaggcggaggcggggaggatggcgcggagcgtgtcgtacgtgtcggcggcgaagctcctggccatggcgcgcagcaacccccgcgtcgccatcatcgacgtcagggacgaggagaggagctaccaggcgcacatcggggggtcgcaccacttctccagccgcagcttcgcggcgcggctgccggagctcgcgcgtgccaccggcgacaaggacanccgtcgtcttccactgcgccctcagcaaggtgcgaggtccatcgtgtgccaagatgttctccgactatctatctgagaccaaggaagaatcaggaacaaagaacatcatggtgctggaacgtgggttcaatggatgggagctttcgggacaagccctttgccggtgcactgatgccccttgcaaaggcacatgctcacctgaagaacctgagttgtaactctactcgcttcctgaatgatcagcaatgttggcagtcgatctccaatgctgaatttggtctatt

SEQ ID NO: 39557 - DNA, 285 bp, Oryza sativa
  Clone ID: uC-osroM202017e10a1
tttttgggctttttgaatctaatgggggttcggattgccgacatatggagcttcattacatacatgttattgacatcaaccggtcatgtaaaatctccagaagccgcacggttcaaatgtgtatattcagtttggactatgaacggatgcagccatccgactgcgactaaagaaagaaggggattgacacctcatggtggatctacaaaatcagctcacactagttgagactggggaagacaccatcatgctgcgggacatactcctggccattgggaagaagac

SEQ ID NO: 39558 - DNA, 271 bp, Oryza sativa
  Clone ID: uC-osroM202017e11a1
aggagcaacctaggcggattttgattttgcgccaaagaaaattcaacatttatatatgtacatacacagctcttactgcgacgcgacgggaaaaacaaacagggagacgaagaaagctgcgaaaaaagaaagaagaaaagatctactcctataggtacataacaacttcgactgatcaacctacagctggaaaattcttatcttgtagcaccatcagaagcgattgctaagcttgtgtggagagttcaaaatggcatccatctgattctga

SEQ ID NO: 39559 - DNA, 277 bp, Oryza sativa
  Clone ID: uC-osroM202017e12a1
atctcctcaaagaatgcaaaattttattccatggagaaacatgaattgcctcagaggggaaaaaaatcatgtaaaagagataattacatgtaaagaatggccaaaaaattgttaatgatcttgtgctgaacatgtttacaaatctcttcggcttctccagctagcttggctcatctcgtcactacaatctcggctgccgaattctctcagctggaacaatctaatttcttcggactgtggttctaagaatacttcactgcggccaggttgaaggcct

SEQ ID NO: 39560 - DNA, 278 bp, Oryza sativa
  Clone ID: uC-osroM202017f01a1
gtcactctcccctgcgtttattatttacagcgtctccgctatacagcaattcaatcagcaacaggattcgatccatccatcgatcgatcggtcggttggttggtttgacagtgtgcgtatctaacatgttgttgcactgcaacattgtacgcgtgatctcgatcatggcggtatgtaggagtggtggacgtcgtggtcgtgccgtgtacagagtacccctttcatctggcacggctccggcagaagcggtgcagggttcactgggaacaggttgtacc

SEQ ID NO: 39561 - DNA, 216 bp, Oryza sativa
  Clone ID: uC-osroM202017f02a1
caacaacacccaattttggggtttttttttttaaaaacccataacctttgttaagcaggaccaaaatggggggaaaaccccctttacatacccagggataaaggcggaaagaaaaagaccccccctggggaggggggggtaaccggaactacaaaataaattttccggaaaaaccctaaaacaaaaaaagggggcaggtctgggggattcgggggc

SEQ ID NO: 39562 - DNA, 267 bp, Oryza sativa
  Clone ID: uC-osroM202017f03a1
ggtgaatgaaattcaccactgcgaggatctgatacatagttgatttgattacccgataagatctatatatatcttacagacgaacagaaagataacacctaacataacttaattactgataataagaactatatatgtcttgcctttgacactggacataatacctaacacgaatttagtgctactattcttcacctgacattgaactcacgctcaccaaaccacaaatcacaatcactaccgacgaattattcatctaaccaaacc

SEQ ID NO: 39563 - DNA, 283 bp, Oryza sativa
  Clone ID: uC-osroM202017f04a1
aaagagtaaatttcttaattgaattcccaggtttaaacactcttgacatgctttcaggttcagacaccaaacatactaaaaaaagctacacctgcccaacgcaaaagagaacagaatataaaagaaaaggaactgcgcaaaccaatgatccatcattgaaaaccaaaagtccaaaaaacctctactgctatccgcacatctcaccagacacaatcagctaaacttctagctctcctatgaaaccacctccaagtcctaaccaaaagcaacggagaaactcaca

SEQ ID NO: 39564 - DNA, 260 bp, Oryza sativa
  Clone ID: uC-osroM202017f05a1
gagaacagatgaattgaatgaatagattgattggtaccagccaattcctgatttgcagaacaaatttcccatagaattcatccacaaaccagatttccaaacaacatgcatgactatgtacgctggtttttacagaactctgaagtagagccgttgatctcatggaccagagcgaagaagcaaccatgccatgttcaccctcccaaaaccaaggggagttcatcaagtttcacaggacagaacttgtggtcgcctgctac

SEQ ID NO: 39565 - DNA, 278 bp, Oryza sativa
  Clone ID: uC-osroM202017f07a1
agtctactattccattatattctagccggcaccagttgcaaatctgcattttacagtgaattgaacaatgaaagtatagctgtcgaatcctctcaagctttctaaagtatttccaaaacagaaagaaaaaggcaccagtgatacacctcactaatgcaaccgttcttcataaacaattcctaaaaggttcatccgtgttgacgtctaaagaatagcagcctaacttgttctcctcgaggaacagccaatccagggctcaatggcaaaaggttgcagcc

SEQ ID NO: 39566 - DNA, 231 bp, Oryza sativa
  Clone ID: uC-osroM202017f08a1
ggcaaaaaaaaacccagggaggatatgatttcaggatcttaaaattttacacagggggcagctcctttttttttttcaacaagagggaatagaattcgggaattacaagcgggcagctttagcctttaagcttgggttataaaaatcgctccttttttagcataccatagttcaccagccccccaaagccttccggtcaatgttgggaaacttggaggttggagatcaggg

SEQ ID NO: 39567 - DNA, 267 bp, Oryza sativa
  Clone ID: uC-osroM202017f09a1
agtcaatgtgcattgaatatgcaatagcgatggaaaacttgcattctacttaatgttgcattccaccggtctatgccccccaaaaacaaacttgaataaaaaaggaaaaaaattccatacaggtccaatgtatagagaaggtgaaatctattaacggggcaatggccaaaaaagacccaaaagggaaagaaaaaaaatattatgaacaccaaatagttgctgtcttctagcacttcctgctacacctccctgcacatccttcgcagc

SEQ ID NO: 39568 - DNA, 257 bp, Oryza sativa
  Clone ID: uC-osroM202017f10a1
ttttttgtttttttttttttttttttttttttttttttttttttttttttttttttttttttttttttttttttggggagaggagggaaaaatttcattcattaaaagaaaaaagacaaacaaaaggggggggggaaagacccccaaaaaaaaaaccaacccaggagcgggggggggaaaactggccgggggggaggggccaaaaagcagggaaacaaccgacctcgatacaggagcagccagagaggagggggggg

SEQ ID NO: 39569 - DNA, 410 bp, Oryza sativa
  Clone ID: uC-osroM202017f10b1
gaagatgatggaaaattttcattcattcagggaatcaagacaaacaaaatgattgatgataagactcccacaaaagaagccaacgcaggagcggtggttggagatcttgtcgtgtttgaggggctcagagttgtggtaatcaccgtcgttgttgtcggagctgtcgttgttgttgttggcgtaaaccaagacacatcgttccaataaacattagttactgatgtgaacccgagaaacgcaacagcattcgagcttttggcaaccatgaaagatcctggcggagaaagggtggacgctgacgaacgattgaatgacagctggtacgtgttgccaccagacaaaggaactgcgtaaagctcccttcgtgtcttttactctggacggcaactgggtgctggttggcttaaaca

SEQ ID NO: 39570 - DNA, 300 bp, Oryza sativa
  Clone ID: uC-osroM202017f11a1
agcccaaggtggcgttcctcttcctgaccaactccgacctcgtcttctccccgctctgggagaagtacttcgccgggaaccaccacctcctcaacctctacatccacgccgaccccagcgccgccgtcgacctccccgccaccgcctccttccgcggccacgtcatccgcggcaccaaggcgacggcgcgcgcctcggccacgctcatctccgccgcgcgccgcctcctcgccaccgccctcctcgacgacccatcgaaccacttcttcgccctcctctcccagtcctgcatccccctcc

SEQ ID NO: 39571 - DNA, 475 bp, Oryza sativa
  Clone ID: uC-osroM202017f11b1
tgttttttttttttttagcagtaaccacctaatggcagaatatgacttcaaacacaagataggttttccatgatacaaacgatacatttcggacgaaaaaaagggcttgatattgacatattgtatataaacatacactacaaaccatcactgcatgtatcgacagattttcctccatgtaatacataggatgatcatgctaactactactctaattacgtgccaacaaccttgtgccctgctgattttggccaccacttgagctcaaattcgaaagggaaaacaaaagatacagagaaaaatactcacataggaggcagctggggcccttttgccaccaacaccaaccatcatgctctctcgagaagcaccatctttttgacgagtgcagttgaagaaaacaaagcaaaccaaggcttggtcctggtttgtactctctggagaatctgcagggtatggaggatcagcttatgct

SEQ ID NO: 39572 - DNA, 259 bp, Oryza sativa
  Clone ID: uC-osroM202017f12a1
ggcagaacatcaccccgggcacattatattcgcaagtcgcaacgttacaacgtcaacatttcaccaattcacaactaaaaacaacgtgttgctggtaagtagaatcgtatgccctgctgtccaaaaggaatgatcttcaggcttttgttcatttcattccaatccggatattcaaattttcagcacacgcagcagggaacacttgcggctattctggcctcccagatcatttattggtaacaattataagcaatgacca

SEQ ID NO: 39573 - DNA, 273 bp, Oryza sativa
  Clone ID: uC-osroM202017g01a1
gttctagaataaaaaaaagaaaaaagaaaaatggaggtgttttctgtaaatgtctttttccaaaaaatcggaaaaaaaactgagaaaacaccatgagctaagcctcggacggatcaaagcggcgatggaaaaatgaaaaaaaaaaacagagaaaattggcgagggaggagagctggttaattagctagtgtagtaaagtgagttcttcgccgcggttagagcacggcggcgagcccggtcaccaccttcccctcggggcgccgcggcggcggc

SEQ ID NO: 39574 - DNA, 209 bp, Oryza sativa
  Clone ID: uC-osroM202017g01b1
cctgtactggccggagcccagcgcgtccgacctatctaacttttccggcgaactccccgacgagatcgatggccgccggcgaacggcaatcgaacaaggagtactaggacgcccttctttgttgtttcttctcggcaagatcagttggctggcaccacctgccattcttggtttggaagtgtgggagggaggggttcggatgataaata

SEQ ID NO: 39575 - DNA, 278 bp, Oryza sativa
  Clone ID: uC-osroM202017g02a1
acagatgtgggactaaacccaactcactttatttatatgaagaattatagaagcaccaggtttaacagataggtacatactttaaatcaccattcgactcaaaccaacacagagcagctccaaattgtacactaacaaccacaacaaacaaagacttcaacagatactccaagaaatttcaatagagttgtagaaatttatagtggattcgctgactccagctctctagcagctagcacacaaactgcacctttcatagcacaccatctgcaattcat

SEQ ID NO: 39576 - DNA, 280 bp, Oryza sativa
  Clone ID: uC-osroM202017g03a1
agttaaaagttgctatattttaggatgaatgtagtactaagttacatgtaaattccacgctcatttcacccgaggatctgatgatctttgctaacagctgcagtgcaaatacgttgaagactccaagaccattgcgacaaggcagatttttcagattgtgtcccatcaggggaaacaaagttgagaggacatgaaaaaattgtaccataaattaaggatggtttgaacaatactttcaactctgaagcaacacgatgaacatgaaggaaacagcatcctt

SEQ ID NO: 39577 - DNA, 282 bp, Oryza sativa
  Clone ID: uC-osroM202017g04a1
caacagcaaccaaaatttagataatcggctttatagggggaggtcattcatcttctaaagaacataacatagctcaaaatttataaatccacatccgatgctaagatcataatagagtacagaacaagttgcaaggacaaggatagatagctttgctttccccccataacaggcactacacggaattacagcctccttcctcttctgccaccctttctgcgggtactgtcagttgggactggagtaacatcctcaatgcgtccaatcttcatgccagaacgt

SEQ ID NO: 39578 - DNA, 276 bp, Oryza sativa
  Clone ID: uC-osroM202017g05a1
gaaagaattatctgcacattttcaatatgtcaacaagtgtaacaatgtcctgtaggttactcacaaacaatggcatctctactacaatcatctccaacctaccaaagcaaccacaaaactaacagaacaaaatttcaaggactcgagtatatcaagaaggaaaaaaagaataaaatgagggggaaaacatataaactctcgcgacctcatagtggctgccttctcttacttcgccatgatcaattaatcgatcgatcgatcaatctgtgctaccct

SEQ ID NO: 39579 - DNA, 252 bp, Oryza sativa
  Clone ID: uC-osroM202017g06a1
gggaacttataccaataaccatgaaaatttatacgagcaagacaacagaaacatgaaatattttcatttgatgataacatcgttccgaaaaccgactgccttcacagcactttgatgacgatataagcaatccgaaaacacattgacgatggtatataagattcctgacaactactttggatattttctttaaaacacgaaaattagtcttccttgtttgacatttccataccaaacaaagaccaagtaagg

SEQ ID NO: 39580 - DNA, 272 bp, Oryza sativa
  Clone ID: uC-osroM202017g08a1
tttttgtagcgttcgaatacctcctgggtaaaccatttggaagagctggaaggagtcaaagtgacttctccctgtcccacattattccgttactccttgtaatgacaaatataacaattaactcaccacacctacattagaagaggatacaagctttattgtgatgatttgaccgctatcttttatcaacattgagcacatactgcactcctataacagcctattagagtcctccatggatgcggacttcgacgaaaaccttttatgcatca

SEQ ID NO: 39581 - DNA, 257 bp, Oryza sativa
  Clone ID: uC-osroM202017g08b1
atcgtcagctctggaaagcaacccaccctactgaccctcctcctctccctgactcactccgtggtcgtcgtcctcctcctcggtctcctcgccccggtccaccccccactgacaagtgggcccaccccaccatcccccccggctgcgtccgcggcgagcagcggaggcctccacctcgccggcggcggcatgagcgggttcttggcggtggtggggaaggtcgggaccttcctgctgtggctgctcttcctcgggct

SEQ ID NO: 39582 - DNA, 296 bp, Oryza sativa
  Clone ID: uC-osroM202017g09a1
gcccccaacggcgtcaaaaccaactgggtcatgcatgaatttcgcatggaaaaccctcacacccctcccaaggaggattgggtgttgtgcagagtgttctacaagaagaaggcggagacggagacggagtcgtcgtacagcatggagaacgagcaggaggcggtgatcgccatggcacggagcgccgcggccatcaaggcgggtggatgctactccaactcctcctcgtctcacgacccggccgccgccggccatcactcgcccccgccgttcccggcgtcgctcgccgcctgcag

SEQ ID NO: 39583 - DNA, 499 bp, Oryza sativa
  unsure (1)..(499): unsure at all n locations
  Clone ID: uC-osroM202017g09b1
aggtgaaaagaggttattaataataaacgctagctagctgcgctgcagaactgcagctagctagcagctgggagtgtgtgtaagctagctaagctagcactagcagcaccgacacctatggtggatcgtcacatcggcatcaggccgttgtaattgtagtgctcctcgagccctagctccatcagaccgcactgctcgccgccgtcgaccctcgatcccgccgccgacgccgacgccgccacggcgccgccgtcgagatgctggctgaagtcgaagatgctgctgtacagcgccatgctggtggtgggggatgaactcgttgagggagccgccgccgccgccggtgacgggcatgtggtgtggggggggtggatcggngagcgcggcggtgggtggctgctgtagtgggtggctgctgctgcaggcggcgagcgacgccgggaactgcggtggcgagtgatggcccgcggcggtccggtcgtgagacgaggaggagttg

SEQ ID NO: 39584 - DNA, 274 bp, Oryza sativa
  Clone ID: uC-osroM202017g10a1
gcaagtcaaatacactcttttctctccatagtagagtttgagcagcgagcgggcaaacataaattattcaattattaaatgatatgatcactcttgatcatctcaacactataggaacaaaacttcgctaccgcgattttactattttagttgtccacaacttcaatgagggttggttcgtagtcagcaggagcctcgaaaccatggaagttcattacggttgcagcaacattggcgagcccaggggtctgaatgtcagaccggaatttcacac

SEQ ID NO: 39585 - DNA, 492 bp, Oryza sativa
  Clone ID: uC-osroM202017g10b1
gttgatggtgatgcagttgtgactttcaatttgcgagcggatcgtatggttatgcttgccaaagcactagagtatgcagactttgacaaatttgatcgtgttcgtgtaccaaaaatccggtacgctgggatgcttcagtatgatggtgagttgaagcttccgagccattaccttgtctccccaccagagatagagagaacatctggtgaatacttggtaaagaatggcgtccgaccttcgttgcagtggacagtgaagtttggccatgtcacatttttctggaacggaaaccgatctggatactttgatgaaactaaggaagagtacgttgaaattcctagtgatattggaatcacattcaatgttaaacccaacatgaaggcacttgaaattgcagagaaagccagggatgccattcttagtggaaagtttgatcaggtacgtgtcaaccttgccaatggtgacatggttggtcacactggtgatattgaa

SEQ ID NO: 39586 - DNA, 280 bp, Oryza sativa
  Clone ID: uC-osroM202017g11a1
ggaaacaaggatgctacaatatattattgcagaaacggcaccaaggccgtttctattattcataggtaacatcccaataacaagaggagacagagcaccaaccacacaccacattccactgaactcacccccaactaaatcaaactagaaaactcccaaattcaatcgaccttactttcttaaggaaaaagagcagtgcctaggaatgcaaagcatcctgaaatatctctcttctcttttcatctctgaaaccagagaatggaaacaaagcaaagaaact

SEQ ID NO: 39587 - DNA, 296 bp, Oryza sativa
  Clone ID: uC-osroM202017g12a1
gcgccggatggtggtgcgggacggaacgatggtgatgacgttgacgagaggcttgtggagctcgcggccgtggacccggcggcgatggcggtgctgcaggcggcaaagaggctgctcgaagggaacctggcgagggcgccggagaggcaccgcgacgtcgcgctccgggggctgagggagtgggtcggcaagcaggagcggttcgaccccggcgtgatgtccgagctcgtggaactcatcaagcgccccatcgatcggtacaacggcgacggtggtggcggcggcgagggggaggg

SEQ ID NO: 39588 - DNA, 333 bp, Oryza sativa
  Clone ID: uC-osroM202017g12b1
acgtgtgcttcgctttgttgcaatgactaaaacacgtatctaattacaaaaaagaattttatgcatgctatgcgtttgcggggttgcgtgcgtggcgtgtcagcggtagaacgacacgggcggcaggcggaagccggagttgcgttggcgcaggaagggtatcgcctcgggccgcgactcgaggtcacggtagaactcgtactccgcctcgtagtcgtgaaggtccagctcgcgccgttgcagcgtgtgtatgatggtgccgcgccgacgcgtgcttgccgaacccgaacaccgacacgcggtcgcacacgcccgacgtggacaccaccgtct

SEQ ID NO: 39589 - DNA, 277 bp, Oryza sativa
  Clone ID: uC-osroM202017h01a1
gggtctcaagctggtatggggattatcacatcaaaggtaattaaacgctgaaagtagggaaacacacggcaggatttacacatggaagatgtttacacacaaacacacttctttgggttgtcgctagcccttgataggagccagcaggctagctgacacgtaccggtctttggtagtactaacagagacagcaagctactaggaacagagtaacaagataagatagcaacatactagataattaattacgtattagataaccacaaggaccagcaaa

SEQ ID NO: 39590 - DNA, 459 bp, Oryza sativa
  unsure (1)..(459): unsure at all n locations
  Clone ID: uC-osroM202017h01b1
gttgttgtaaagttgcgagagagagagagagggggatcagttagtttgttgaggggaagcagatcaggaagatgctggagaagctgtgggacgacgtggtggccggtcctcgaccggagaccggcctcgagaagctccgcaaggccgctacaacccgcccccttgtcatcaacaaagatggcgacggcgaggcgagcggagtggcgtacaagcggacgcagtcgatgccgacgaccccgacgacgccggtgacgccgtcgtgttcgtccccgacgacggcgacgacgacgacgccgcggggcagcaacgtgtggaggagcgtgttccacccggggagcaacctacgcaccaagagcctgtgcgccaacctgttcgaccggccccagcccaactgccccaccgtgtacnactggctgtacagcgacgagaccaggagcagccatcgctgaactgaataat

SEQ ID NO: 39591 - DNA, 279 bp, Oryza sativa
  Clone ID: uC-osroM202017h02a1
ggcgttaattcgggtcgctgggatttgcatcacctaaaaacacgactgcagtaaagcagcttgaaatttacatacatagtacctgtatcatgaatataagtaaaacttctctgaatacattctttgttcatgctgcctgggtacattaaccttccctctttagctctgcagctctgctgcatatgtgaactcacaacatacatgctagctttcctatttgtactactatattcttttccatttatcaacggacgacatgcattgctgtgctacttcacc

SEQ ID NO: 39592 - DNA, 524 bp, Oryza sativa
  Clone ID: uC-osroM202017h02b1
gacgcccgccggcacgggccgggacactggaccggctgggcccacgcgcgcgttttctcaccggagccatagccggcgggagagggcagcccgactgccagagcctgtacctacgactatccgcggccggatggcgccccgcgtgtccctgctcgccgccggcgccgtggccgtggccgtggtcctgcttctcgccgcgccggcgcgggcgtccaacgacgagggggacgcgctgtacgcgctgcggacgaggctgtcggatcccaacggcgtgctgcagagctgggacccgaccctcgtcaacccctgcacctggttccatgtgacctgcgaccacgccagccgcgtcgtccgcctggatttaggaaactccaacatctccggctcgattggccctgagctaggccgtcttgtgaacctacaatgcctggagctgtacaggagcaatcttaacggtgagatgcccaaagaattgggcaatctcaagatttgatcagcttggatttgtatgccaacaagctcac

SEQ ID NO: 39593 - DNA, 276 bp, Oryza sativa
  Clone ID: uC-osroM202017h03a1
acaacttgccggtggaataaataattgcctaagacgacagggacaggaaccaaaatttttcagcatacatgtgtatatattttatatatactaaaggaacagaactaataaaagaatgaaatgtctcagaatcccagaaacataagatgaaagtgagaccaaaaaagggtggtttagggagcctcttatataataggatgccaaatcaaaaacattttggccagacttatttgttagcagtgtatattttgctcgtatttatagttggtacttctc

SEQ ID NO: 39594 - DNA, 367 bp, Oryza sativa
  Clone ID: uC-osroM202017h03b1
gcgcccaaatcccctccattgccttcctcgcttcgcatcgccgctcccgccgccgccgtcgggctgctcgccggcattgggtgttggttgtgaccgtatacaattattgtttttggagctgagcgatcagatgcatgagccttccttttaaatgatctgtgtccaccatggcgatgaaccaaatgcaggaacttcccgcttaatgggctggatgcgttgtatgcacgtttgcagtgacaagaagacattgaaacgttggttttttattgacaagagggttggttgagtgtctaactcttaaggaatcctatagtctacttgcttgctcttgtgttgttagtaactgttcttacaacaactctgcgga

SEQ ID NO: 39595 - DNA, 277 bp, Oryza sativa
  Clone ID: uC-osroM202017h04a1
gtagaagtaataggtggtcctgaataaaatttgtgaatgtatcaaccaacatacagctatatctgacctgaacagcaggaagtaagccgtgcccaaaaaaagggggaaaggactaagaagaacaagacatggatcgataatatgtgcatgacaagcgctagctacaagggctagaagatatgtaaccacctaaaccacagcgatgtacagcaacatccggcgagctaatccctcatcaacaaatcgaaagaaacaaaagaatccatccgtccatact

SEQ ID NO: 39596 - DNA, 287 bp, Oryza sativa
  Clone ID: uC-osroM202017h05a1
gggttattaattggtggtgctgtagaaaaaatcaaagcgcaccaaccaacattcgggcatttaagaacgaaacagcggtttggggggtgcccgtacaccaccggggtaaagactgacagaaacccgacagggatcgttgagagcagcatgacaagctctagctgcaagggatcgaactttagttaccaactaacgcacaaccgatgtacagaaacaagtcggcgagcccaatgcctcatgaacagaaccaaggaaccacacgaatccatccgtccactactggaagc

SEQ ID NO: 39597 - DNA, 279 bp, Oryza sativa
  Clone ID: uC-osroM202017h06a1
agaaggcaaaagcgcatctgattttttattattccacaacccaacactatgacactaacaacagccacagcctcaagaattgagcacatcactcactctcatcgttattgcattcccccaccacaaacaaatccaccccaacaacatgtgtatgtagtactacatgatcgccatctctctcgtcacgacggcgtcacgtcccaaccaacgtcactctccaccgacatcgccgccgcatcagctgctgtgcgcctgcgtggtgaggccgtagccgaaggg

SEQ ID NO: 39598 - DNA, 272 bp, Oryza sativa
  Clone ID: uC-osroM202017h07a1
aaaatataatagcgtcacatcctttaaaatccagaggaatgaacaactcgtgaaaactttacaaggcatttgtaggaaacaaagtctagaaatataagattacaaaaacaaagaaatgaaaacatgacatatgacctcacaaaatttaaatccaaaatccctatggaagagcctattctatctgaattccaaagaaacccatgtaagggttgtgatcctctaaatgaggctttataatcaagggacttggtcatttacattgggatttctac

SEQ ID NO: 39599 - DNA, 561 bp, Oryza sativa
  unsure (1)..(561): unsure at all n locations
  Clone ID: uC-osroM202017h07b1
tactgccttcgtttgctataaccatgaaaccagcacaacaataagagactccaattgcaagagaccttccaggaaatctttagtaggcatcatatgttcaatacaaatatacctgaggttgttagagcaaattatctgctcatgtacgattacactatctctattatcagaaaatcacaagaacttttgttgctgggttttgcattagtacaagtatctggctcctgatttttcttgacgtttatcattttccattctgagctatacgagcaataggctccggattgtagtgatctcctgtgcaagttttacctcttcggcaaaaaataattgtcggcctacggggcaaactattctgtcccctctaactaataatgtctttgaacattttgatcatataccctgccattttatcaaaaattgaggatttattcttctgtcactgacatgtagggtttatctgagggcattgacatgcngaccatgagggtanatcctcaattgtatctaatgggagggcatatgatcaagatccacattaaggacccagctattaaaata

SEQ ID NO: 39600 - DNA, 286 bp, Oryza sativa
  Clone ID: uC-osroM202017h08a1
tttttggtaacaaaagccatactctctgtattaaagatccaacaggttcagagaacacgcaagctcagaactacacatcaccaaaattggagcaagtttgggggtacatatccgctcatacagtggaggatttatttctcgattctacgagctttttaactagagttcgaccgggaagtcaattacggatagaaatgagcatcctgtcttcacaaaacccatgcacacaacagtgggcatgaaccgcatgagattaaccatcaagtttagttgggctccacgggtg

SEQ ID NO: 39601 - DNA, 274 bp, Oryza sativa
  Clone ID: uC-osroM202017h09a1
caaaaactctggcatggattcattacaagtcacaacaaatgtagccatacatcaacgcaacaggtaatcgtcatagcacatttgaacctacatgtgcttaattcactcatgttctggttagctactgggaaactgtcagctacagatgtcagcctaacaagactttcctcgcttctctttaatcatccactaatggcaattgcttgttttcttttacagaactaaactaacaattgtacaaagcatatctcacagattagcatctagtagctaa

SEQ ID NO: 39602 - DNA, 489 bp, Oryza sativa
  Clone ID: uC-osroM202017h09b1
gtcaccaatgtaggagatatccaagagaaccggacaaaattggtgtgcagtctttgcaaggttatgcatggtgcatgcattcgatgtagccatggagcatgccgagcctgctttcatcctatatgtgcaagagagtcaaagcatcagatggagatatggggcaaaactgggaacaccaatgttgagatgagggcattttgcttgaagcattcgacagtccaagaaactatctcaatacagaatgacagaatatgtgctgaagaggatacctcacaaatcgagcttgatgatgcaagccttgccactcagaagattcaacaactgagattgacacgcaataacaaggacaaatttaccagcagcatgattgctagctcttgttcgtctagcctcaaacagacaacagaattagccacatcgccatctactgctaggagtgtgggaagtcaagaaacccaaataacagatatggctgttgatcgacctata

SEQ ID NO: 39603 - DNA, 277 bp, Oryza sativa
  Clone ID: uC-osroM202017h10a1
gatgatcattcatgtgtgcctatggatttctagtaacactacattccaaaaaattctatatctgacctgaacagtaggcagtgggtgtgtcctacacacagggggaagtggttattctatagcgatcgtgacaacgaccactactcaggtacggagaactaggcctatggaccagaaaataaagcgctttccataacttcataagaaaaagggaggggcacacatagtttactactgtacacggagcataattcgtcctgatctagttcttgtgcat

SEQ ID NO: 39604 - DNA, 285 bp, Oryza sativa
  Clone ID: uC-osroM202017h11a1
tttttgtttttaactgggtagtttgcttttagttttatgaatgaatacactacaaacagctaattacattgaccaacctaatgaggtttttgactgagcagctaaatcatcacagcaaataggcagtacgcagagcgtcacaaaagtaaacccaacgctaagctattaccatatagatacaactgcctttcaaaatattctggacaaccaacgagtaccttgtcgacaacctaccacctacatgctctgaaaatgctgctgatcgccgatatcatcatattccgc

SEQ ID NO: 39605 - DNA, 266 bp, Oryza sativa
  Clone ID: uC-osroM202017h12a1
cttcttcttcttcacagttcacatggaaatcagaaggaagtagcaaaaggaagagctgttctacactcgacagagtaacaaactaagagagcaacacaagtaacaagaggagagatttagtctcttttctggtgttctgcaaataaaactctcccctcttgctacccctaaaccccaacccaaggtagtagtaagtcaccccactaaaagtaaccggccatctcttacaaaaattggctgtctcctttgaatcaatcgaatcagat

SEQ ID NO: 39606 - DNA, 351 bp, Oryza sativa
  Clone ID: uC-osroM202018a01b1
tggggttttttttttttttttttttttttttttttttttttttttttttttttttggccaaaacccacaaagggatccatcttttggttaaaagcagctcactaaaatttatcaaacttgggacgtacatcgaccccgtgttctcaaaaagatattaaagaatgcgatttgcatactacatttacatctccgggggaacaaaacacattcattattcgccatttgacgtgctctttttattatttttttcatcgatgacggatcatgcatgccttgcgtacgttatgaacatctttttgggtggaactcaacggagcttgtacttggggggggtgccctgggggaacccct

SEQ ID NO: 39607 - DNA, 451 bp, Oryza sativa
  Clone ID: uC-osroM202018a05b1
ggttgatgtttgcccaatctgtcttgaagaatatgatgcagaaaatcctcgctctttaactaaatgtgagcatcatttccatctttgttgcatacttgaatggatggagcgaagtgatacctgcccagtttgtgaccagattactttgatagatgatatgtatgaatagcattggagcatgggactattatgtttggtttgatgctagtttgttctaatgaggaagtacagtcagcaaagctcctgatctatcaacctggtcagacgggggtgctattggaatgaattttgagaaaactaagggaaaataattgaagacgggaatggcttgaaatttgttaaatatcatctcagctttttacattttgtttgaagcattaactgttcatgacaacaggaggatttgttagtatccatatctactgctggttcgattgcttcacagctgatg

SEQ ID NO: 39608 - DNA, 463 bp, Oryza sativa
  unsure (1)..(463): unsure at all n locations
  Clone ID: uC-osroM202018a10b1
cttttcctccggctcttcttcagtatcgaatcctgtcttctcctcgtgcccaccaccaccaccgtagcaatggcgggcaacgggccgatcaacaaggaggacccgctcaactggggcgcggcggcggccgagatggccggcagccacctcgacgaggtgaagcgcatggtggcgcagttccgcgagccgctggtcaagatccagggcgccaccctccgcgtcggccaggtggccgccgtcgcccaagccaaggacgccgccggcgtcgccgtcgagctcgacgaggaggcccgcccccgcgtcaaggccagcagcgagtggatcctcaactgcatcgcccacggcggcgacatctacggcgtcaccaccggcttcggcggcaccttccaccgncgcaccaaggacggccccgcccttcaagtcgagctcctcaggcatctcaacgccggaatcttcggcactg

SEQ ID NO: 39609 - DNA, 446 bp, Oryza sativa
  Clone ID: uC-osroM202018a11b1
ttattttattcagctgaagtgtatttgaatgggcatagagaggttcttccaaaaggaatgttccgaaggcacaccctcgatattactgatgttcttcgtccggatggtaaaaatctgcttgctgttcttgttcatcctcctgttcatcctggtgcaattcctcctcaaggaggtcagggtggcgatcatgagattgggaaggatgttgctactcaatatgttgaaggatgggactggatgtgtccaataagggatcgaaacactggtatctgggatgaagtatcaatatccgtaactgggcctgtgaggataatggacccccacctagtttcaactttttatgatgagtttaagaggtcatatcttgcactgcacgcttcagttggagaacagaagtttatgggtttcagattgtaaattgaaaattcaagttttaactgaactcg

SEQ ID NO: 39610 - DNA, 519 bp, Oryza sativa
  Clone ID: uC-osroM202018b01b1
gtggaggccaaattaactttattagcatggcttccaggtacaggtttagctgcccttcaaaataattacaaagaatatttgacataaaagaattgctatgccatttctatcattttttacgatgtcaaacaatatacagactagcgaataacctacaaactgacacagttatggcctaccaaggtacagagtgaataaattacggatgctgaagtttgcttgtaaaatctaccacttctaacgtttctatctcggtgattttgtggaaatgcatcttccgcacaagataagacttgatacagctcgtgaccttcgagacctgaccctcaacgaagatagctgtagagagatgattcaatgagtagccaacgagacaaacaaccatgtagaaacataagaaccgtaatttaatcaggattcaaatactcttcagaaacataagaaccgtaatttagcaggattcaaatactcttcagaaacataaacataagaactggtatttaagcaggactcacatac

SEQ ID NO: 39611 - DNA, 428 bp, Oryza sativa
  Clone ID: uC-osroM202018b03b1
ttgtttgtcatagaacatcaaattggcctatatttgactcggatgctcagttcagagagaagaaaaaacaggagcatcaaatcaaaaatacatataggataataagctccttttggagagcaagattgggcgcaaaccaattaaaccgacgcatagacaaattataccaaagccgctcagatggatggacgagcgccgcaacgacgaacagtgaaggtgaaggcttgacaggcaaaacagctcaggtctcatttgtgtgattcatgcaaaagatgttacattccatggctagcaacaagtagaaggtgatttgtaaagccctgtcgaccaagcttcaggcccaaccaaacatgtcttcttcaagatacataaaccataacgatttaacttcaagatatcatgcatggggctgcagcccttgagcccta

SEQ ID NO: 39612 - DNA, 486 bp, Oryza sativa
  Clone ID: uC-osroM202018b04b1
catagaacatcaaatttgcctatatttgactcggatgctcagttcagagagaagaaaaaacaggagcatcaaatcaaaaatacatataggataataagctccttttggagagcaagattggtagcaaaccaattaaaccgacgcaaagacaaatcagaccaaagccgctcagatggatggacgagcgccgcaacgacgaacagtgaaggtgaaggcttgacaggcaaaacagctcaggtctcatttgtgtgattcatgcaaaagatgttacattccatggctagcaacaagtagaaggtgatttgtaaagccctgtcgaccaagcttcaggcccaaccaaacatgtcttcttcaagatacataaaccataacgatataactccagcatatcatgcatggggctgcagccctcgagcctcatcacaaaaatgcaattgagtcaacctaaatgcttaagaaattcaagacgcctttcctgcaaagctc

SEQ ID NO: 39613 - DNA, 466 bp, Oryza sativa
  Clone ID: uC-osroM202018b06b1
ctcatcctcatcctggagaagattccagtccttccattgcagctgtggttgcttctcaagactggcctgaagtcactaagtatgctggattggtgagtgcccaagcccatcgtcaagaattgatacaagatcttttcaaagtatggcaagacccgcatagaggaactgttactggtggcatgatcaaggagcttctcatttctttcaagagggctactggacagaaacctcagaggataatattttacagggatggtgtcagcgaggggcagttttatcaagttttgttgtatgagcttgatgccattagaaaggcttgggcatccctggaacccaactatcagcctccagttacctttgtggtggtccagaagcgggatcacacaaggttgtttgctaataatcacaacgaccagcgtactgttgatagaagtggaaacattctggctggaacttgtgttgactc

SEQ ID NO: 39614 - DNA, 447 bp, Oryza sativa
  Clone ID: uC-osroM202018b07b1
caccagggaaccatatagggatagaataaccaaaacataggaggtttcatttcttcttctcaaagtagtgtagcatctttccttctttcaccattacataagcttaagcaataacagataacaaatcctcctcctcctctaggtaaaatattcaaacacaatacccttataagtacttattattaggaaagtagcgtgcatgggcataaatggcatcggggggcaggttaagaatcacaatgctgagcagcgaggaaacaaaacaccataatgggacagagcaaaagcctccgaaagggagcttttaggcagaaggcttctcccacttgaggggcttcaccacctcccaggtgaagtctgggttcgtccttccgaagtgaccgtaagccgccgtcttgaggtagcgtccgttgccgcctttcttgaggtcaaggttgatgatgatca

SEQ ID NO: 39615 - DNA, 453 bp, Oryza sativa
  Clone ID: uC-osroM202018b11b1
tcacttccccaaatccccatccagaaaccaccccgatccgcgacgaagatgccggccgcgccgacgctggtgcccgcctgcgacctggaggagccgctgctggcggagtcgtccgagcgattctcgatgttcccgatcaggtacccgcagatctgggagttctacaagaaggcggtggcgtcgttctggacggcggaggaggtggacctctccgccgacgcgcgccactgggacgccgcgctgtcccccgacgagcgccacttcatctcccacgtgctcgccttcttcgccgcctccgacggcatcgtgctcgagaacctcgccttcaggttcatgtccgacgtgcaggtcgccgaggcgcgcgccttctacggattccagatcggcatcgagaacattcactctgagatgtactcgctgctgctcgagacctacatccgcgacggcgccgag

SEQ ID NO: 39616 - DNA, 484 bp, Oryza sativa
  Clone ID: uC-osroM202018c01b1
aattctgtttcgtgtcactcctcccgttaagcttcccgcggcggcgagagcaagctaagctaggtcgggcatggggaaggacgaggtgatggagagcggcggctcctccggcgagttcgcggccaaggactacacggacccgccgccggcgccgctgatcgacgcggcggagctggggtcgtggtcgctgtaccgcgccgtcatcgccgagttcatcgccacgctgctgttcctgtacatcaccgtggccaccgtgatcgggtacaagcaccagacggacgcgtcggccttcggcgcctacgcggcgtgcggcggcgtgggcgtgctcggcatcgcgtgggcgttcggcggcatgatcttcatcctggtctactgcaccgtcggcatcttcggcgggcacatcaacccgggggtgacgttcgggctcttcctggcgcgcaaggtgtccctgggccgcgccattctctacattgtggcgcagtgc

SEQ ID NO: 39617 - DNA, 553 bp, Oryza sativa
  Clone ID: uC-osroM202018c03b1
gccaaactctctagcaatcttgatccgtccctttccgcgagacccttccgccgccatggccgctgcagacgccgtggcacccgacaacggcgatcacgccgtcctccgcgaccacgagcgcgggatccctcgatccctttccctcctcgccgcgctcgtggaggccgaagccctccgccacgccgccgccgccgacgccgacgccgactcagacctcatccgcgccttccgcggcggcacgacgcccatcgtccggatcggtgagttcctggagcgcatccacaccttcatccagcgggagagcgtccgccacgtgatcgagatccaggacgcgtgctacgtgctcgccgggatctacctgttccggttcatacgcagcggcgccgcgcgggaggcggtgatcctcgtcgatccttccaccgcgcaccgccttgtcgccgtcgcgatcttcgtgggcgccaagttggggggcccatcgacaggctcccgacgaggtggaccgtggtgttcgagaccagctcggatgcggcgatccgcgcgagggagatggccg

SEQ ID NO: 39618 - DNA, 502 bp, Oryza sativa
  Clone ID: uC-osroM202018c04b1
gttctgttcttatcctttcatttcgttctgcttaaattgactgacctataaatatgaatatggtgttggattggtttgcaaagatcttttcaggtgtggaaccggatgcatcccaggtttgaaagcattcttgaggcatgtcttgtactctcacccttcaaatttaacatttaaaatgttctttttgtctatccggtgttgtttggcaccttctctgccatggaagagctcgtctgtcatgaactgagcaattggcgaggagttgaagagaacaaccacccttgacacaccgaatactttgtcacagattttgtcaggagacggagacttgaacagatggcgcccaaatcttcattaaatcatacgctgaaagaaaaaaaaggatgcctttcggttgctttcaggataagagaagctctgggattgagaaaccatggaagctcaaatatgaagttcttaggctaggctctggagttatggacttgtggttgtgggaagactg

SEQ ID NO: 39619 - DNA, 538 bp, Oryza sativa
  Clone ID: uC-osroM202018c06b1
ccatatttctcctcggaaagtcaaaggcaagaaacaccatggatgccactgccatcggcaacggcgccctgcactccaatggcgccggcgccgacaccaaagggaagccgatcaaatgcaaagcggcagtggcgcacggccccggcgaggcgctggtgatggaggaggtggaggtggcgccgccggcgaggatggaggtgcgcctcaaggtgctcttcacctctatctgccataccgacctcagcgcctggaaaggagagaacgagcttcagcgaaagtttcctcgcatattgggtcatgaggcagcaggggtggtggagagcgtgggagagggtgtggaggatcttgcccctggagatcatgttgtccccatcttcaccggcgagtgtggtgcgtgcacctactgcgagtccagcaagagcaacctatgcaaaacctaccgtgtcaacccattcaagagcaccatggtcaccgatggtggcacgagggtcaccatgatcgaccgctccttcggcgcacgcaacccggtctaccattt

SEQ ID NO: 39620 - DNA, 505 bp, Oryza sativa
  Clone ID: uC-osroM202018c09b1
tttttctgggcagcttacacaggggagtgaagtggagtgagtgtgagagagagtgagtgagaatgggtggcaaggccgctctcctgatggccctggtggccatgagcgtcgtcctggaggccagggcggacgccggtggctacggcggcgggtacacgccgacgccgacgccggtgaaaccggcgccgaagccggagaagccgcccaaggagcacaagccgccgcaccaccacgagcccaagccggagaagccacccaaggagcacaagccaccggcctacacgccgtccaagccgacgcccaccccacccacgtacaccccgacacccaagcctacgccaccgccatcgtacaagccgcagccgaagccgactcccactccgtacactcccactccgacgccgccatcctacaagccgcagcccaagccgaaccctgcacccacgtacaagccgcagcccaagccaaacccgccacccacgtacatgcctgcgccgtcacctac

SEQ ID NO: 39621 - DNA, 444 bp, Oryza sativa
  Clone ID: uC-osroM202018c10b1
aaatcacacaaaaagagaagaggaggaagaagagaagagagagagagagagagagagagagagagagagcaacggaaaagctacccaagggagaagcgagcgagagagcgaagcagcctcctcctcctcctctctctctccttcctccgattcacacacactcctcgccgtcttgtttcttcttcgtctgggtggttgatccatccatccagagattgcctgtgcgaggaagggagcgggcgagtggcggatttgtttttggtttgtttttgagtttgtttttattggtggtatcctctcctcctcctgtgcgaggagcagctggtggattgttcgttccagctccgtttcttgtcttgatttggaatccgggaaatttttccgcctcccgtttcttgatttccggtccccccccttccttggtggaagtgggaaagggagggg

SEQ ID NO: 39622 - DNA, 349 bp, Oryza sativa
  Clone ID: uC-osroM202018c12b1
aggttcaaatccaacttattcataaagcatactgctgtcccacaggaaactgtttcataaaactaacatatcatacggactcgatggtccattaaaccagacacaagtagacatcagcaccacaaatacttgacgaacagaggctcgggacgaccaggcacatcggcagctccaccaaactggctgattactgaccaccacggaggcggagcaccaggtggagggtggactccttctggatgttgtagtcggcgagggtgcgtccattctccagcttgttgccagcgaaaatcaaacgctgctggtctgggggaattccctccttgtcctggatcttggccttcacatt

SEQ ID NO: 39623 - DNA, 296 bp, Oryza sativa
  Clone ID: uC-osroM202018d02b1
gacccggatattaattggccgatccacgcacgcgaattcactaatcgatcgagacttccagttctcctgcttggtgttcttcttaccccctgtggaggtaacaagaactcaagaacaaggtgtttgattttgactatacacagaactgcggtcaggacaactctgcgtaagcgatactttgtgtgtgtcatgtgctcagggccgtgcgagccgtacacaccgccgctgcaccagcatcagaaggaggctacccttgattgcagacgtactagcttcttgagcctggcgggacctga

SEQ ID NO: 39624 - DNA, 465 bp, Oryza sativa
  Clone ID: uC-osroM202018d05b1
caacgccgatcgggttgttcgtgttatcctctctgacctctcctttctctctccctgctcttcggcggccgcctcccccctcccccccttccccaagccgccgccgccgccatggccatgaagggacccggcctcttctccgacattggcaagagggccaaggatctgctcaccaaggactacacctatgaccagaagctgaccgtctccaccgtcagctcctccggagtgggcctcacttccacagctgtgaagaaaggggggctttatactcttgatgtcagctcagtttacaagtacaagagtactctcgtcgatgtcaaagtggacacagaatctaatatctctactactttgactgtgtttgatgtccttccatccacaaagcttgtgacaagtgtcaagctgcctgactacaattctggaaaggtggagatgcattacttccatgagaatgccagtttt

SEQ ID NO: 39625 - DNA, 594 bp, Oryza sativa
  unsure (1)..(594): unsure at all n locations
  Clone ID: uC-osroM202018d07b1
ctctactccggggacgcgcgcagggcgcaggagctgctcgcgccggacctcgagtggtggttccatgggccgccggcgcaccagcacatgatgcgcctcctcaccggcgccgaccacggcgagtcaaggttcctcttctcccctcgctccgtcgacgccttcggctccaccgtcatcgccgagggcaccgacgacacccgccagctctactgggtgcacgcctggaccgtcggccccgatggggtaatcacccagctcagggagtacttcaacaccgacctcaccgtcacccgcctctccgcctccgccgccaagaccaccgccgccatttcttcctccaactccaaccacgcctnctcttcggcgccgccgccgccgccgtccaagcccaagtgcctgtggcagagccgccgcgccgaccgcgcgcacaagtcgctgccgggcctcgtcctcgccatctaagaacgaactcaaaagacatcaagaactcaaggcgcataaagcttnccttaataatcacatataaaaaaatcaagcgatacttatcatagtgataagctaataaataaaacggaagccacgcactgagtgagt

SEQ ID NO: 39626 - DNA, 516 bp, Oryza sativa
  Clone ID: uC-osroM202018d08b1
tacttcctgacaaaatcagcaagatgatctcctagctgtccagcaaccaacactacgtactcatctacccccgccaagatatgttcggcagcaagtatcaaagcatcttctaggcatagcatctaaacccatacctgcttgtgtttgagtaggaaaatgcaactgggcttgaccttaagaagcagtacctcagagagaataaccttgccttcaatccaaaagacgtgtactggtaggagtaccgcactgagttctttcttgataatggcatggatctctctacttttagttgggagctggaggatgattgcatcgacggctactgcttttgggtcagcatcactgaaatggaagttgatccctaggccaacatgtaacagatgatacactttgacagcaatacaagaaaggaagccagtattgccttcttcataccccaaaataggtcgtatttctacatcaagaaggatcccaatgataccttcacaacctcaggaataagatagtcatgaactg

SEQ ID NO: 39627 - DNA, 422 bp, Oryza sativa
  Clone ID: uC-osroM202018d11b1
aacctacccaaattaccaaactatactactgctcgacacggttcgttttttttcaccgacccaagaagcagagaaagaaaggaggtgagaaatctggtgggtgtggtgatggccgcggcgagtttgatcaaggcgcccgtggggcagaatcctgcgaggatgggcgcggggaggagcagcggaggaggaggggtggtcaggtgctcgctgcagggcgccgtggtgggcggccgggcggagtggcagagcagctgcgccgtgctgtccagcaaggtggccgcgctcggggcggcgtccccgcacgccgcggcgccaagctttcgtaatgggcatgtcgcgccgctggtcccggagcagcatgcggcggccgaagacggcggtgcggtgcttgatttggtgcccgtgagcagcgttaatggcgg

SEQ ID NO: 39628 - DNA, 449 bp, Oryza sativa
  Clone ID: uC-osroM202018d12b1
tctttagtcgcacggattcgtttttcgttaatttggcaaataggtatggttttgccgatgtctcgcgcgacgagggtggccgggaggctgatgccagagatatcgttgctgagacgggggaggaagtcggcggcgagaggcggcgacgatgcggaggtggaggtgtcggtgccggcgaacttcgtgtgcccgatctcgcttgagatgatgagggacccggtgacggcgccgacggggatcacgtacgatcgggagagcgtggaagggtggctggcgagggggcacgacacgtgttcggtgaccggccggccggtgaggctcgccgacctggtgcccaaccacgcgacgcggcggatgatccaggactggtgcgtggcgaaccgggcgcgcggggtggaacgggtgcccacacccagggtgcccgtcggtgaggacgacgccgaggaggt

SEQ ID NO: 39629 - DNA, 468 bp, Oryza sativa
  Clone ID: uC-osroM202018e07b1
tgtagtgttgtgtattatttgtccaccgctgagaagctagcaaagccagccatccattcagcgcagtactctcgggagagctagaagcgatctattctagccacaaggaggagagataaacgtatcgaaatggagcacatcgcgaggttcttctttggagtttccggcaatgtcatcgctctcttcctgttcctttcgccagttgtcaccttctggaggatcatcaagaagagatcaacggaggacttctccggcgtgccttacaacatgacacttctcaactgcctgctatctgcttggtacgggctgccgttcgtgtcaccgaacaacatcctggtgacgacgatcaacgggacggggtcggtgatcgaggccatctacgtggtgatcttcctcatcttcgcggagaggaaggccaggctgaagatgatgggtctactgggcctcgtcacctccatcttcaccatg

SEQ ID NO: 39630 - DNA, 493 bp, Oryza sativa
  Clone ID: uC-osroM202018e08b1
tgttttcttcgtactcgcctctctccgcgccctcctccgccgccgctcgccgccgttcgtctccgccgccaccgccgccgccatgagggagtgcatctcgatccacatcgggcaggccggtatccaggtcgggaacgcgtgctgggagctctattgcctcgagcatggcatccagcctgatggacagatgcccggtgacaagaccgttgggggaggtgatgatgcttttaacaccttcttcagtgagactggtgctgggaagcatgtcccccgtgctgtcttcgtcgatcttgagcctaccgtgattgatgaggtgaggactggtgactaccgccagctcttccaccctgagcagctcatcagtggcaaggaggatgcagccaacaactttgcccgtggtcactacaccattgggcaaggagaatgttgatctgtgccttgaccgcatcatgaagcttgtcgacaactgcactggtcttcagggctttcttgt

SEQ ID NO: 39631 - DNA, 428 bp, Oryza sativa
  Clone ID: uC-osroM202018e09b1
ttgcgtgccaagctaccattctcctcctcggcggcggcggcggcggcggcggcggcgatgcatatggcggcgaccaccaccaccaccgactcctcccaggcggccgtgccgcctcaccaccctcaccctcacgcccacccgcacccgcacgcgcacccgtacccgcaccaccccatggtgcatgcgcggtgggtcgttctgccttacccgcctccgccgacgtccatggtggccgctccgccgcccccgccggcgcagtacgccaagcacttcgcggcggggccgtcccccgtcgcggcggtcgggcggcgcacgccgaccctcgccgtccccgccggatcctgctggaacgggtgctttgagaacaagacgatctgggttggcgacctccagatttggttgtgccagaactatccttcaccgttgtt

SEQ ID NO: 39632 - DNA, 533 bp, Oryza sativa
  Clone ID: uC-osroM202018e10b1
tatcgcgaatcacataagagttcaagccaaagctaagaggccatgagatcagctatggctactgcatcggtggttacctatcttcagaggccgagagagcttccggtgccggagttccgggcaccgccgccgtctccggtcaccggcgtcctcacgagcagtagctccggctctcttgcatacggcgagtgccccgatagcaacgaagacgacgagatcggcaggttcttgcgccgctccgccagagtcccggtgctgcggctgccggagagggccgtcccgcggaagaagaaagcggcgtgggcacctccggtcatcgacgtgcgcctgctggccttgccggaggccggcggtccggtggcggaggcgctgaggtcggcagccgtcgcgtttggctgcttccaggtggtcggccatggggtcgaccggagcttggtctcagcagcgttgcgtcatgtggcagctgcaactgcaagggcggcgacgccggagccggaggaggtggaggtcaacggagacgatgagaacggtga

SEQ ID NO: 39633 - DNA, 553 bp, Oryza sativa
  Clone ID: uC-osroM202018e12b1
tctctttcttcctccctcccctccctccttcccccacccgcttcccttgccgtcgccgccgccgccgaccgccgcgggaggggaggtccccggcgccatctcccagaaatggacgcctgtttttcaacacagcttattgatggagatggcgttttcaatgtttctggattggagaacttcatgaaggaagttaaaatgggcgaatgtgggctttcatatgctgttgtgtcaataatgggtccacaaagtagtggaaagagtacacttttaaatcaccttttccgcaccaatttcagggaaatggatgccttcaaaggaaggtcacagactaccaaaggtatatggatggcgaaggcccataatattgaaccatgcactcttgtaatggatttggaaggcacggatggtcgagagaggggagaggatgacacagcctttgaaaagcaaagtgcactgtttgctttggctgtttcagatattgtgttgatcaatatgtggtgtcatgacattggagagaacaggctgcgaccaacctcttttgagactgttttca

SEQ ID NO: 39634 - DNA, 473 bp, Oryza sativa
  unsure (1)..(473): unsure at all n locations
  Clone ID: uC-osroM202018f01b1
atcttgttcggccgccctttntttttttttttttgggtttttaaagaaaaggtaatcatctatgtataatcagatgaacaaatcaatagaacacaactcgatcgacctcttcccttgctgcagccatggctcatgcgtgtagagccatgcgagcaattaagggaaaattttgtaaaccacctaaattatctacaattttgatgaactaattaatttacaagcctatacatatgcaaaccaagatgattttaagctcatttcggaatttctttttcgattattacgccgtgcaagtgcaaggtcgcgagaggaaaaccctaattggcgaccatgcatcatgcacagcgactgcgtcgccgtcgccgtcgccgttgctccggtgagatttgtatcattattggtgctgcgacggcagcggccccaagatgtctaggaaggcggacggcgagccgagcgcccccggcgcgccgacg

SEQ ID NO: 39635 - DNA, 444 bp, Oryza sativa
  Clone ID: uC-osroM202018f03b1
ggtgagttggctgatgacatcccgccggagcagcacgcccttgtgccgtctttcatgggcggcggaggaaagaggatccaccctcttccttatgcggatccaaaccttcctgtgcaaccaagatccatggacccgtccaaggatctcgcctggtatggctatgggagtgtcgcgtggaaagaaagaatggaaagctggaagcagaagcaggagaggttacaccagatgaggaatgatggcggtggtaaagattgggacagtgattgcgatgatgcacatctaccactaatggatgaagctagacagccattgtgcagaaagattccgatttgttcaagcctggggaatccttataggatgactatcatcattgggctggtggttctgggcttcttctttcactatcgagagatgcacgcagagcctgatgcatttgcattatgg

SEQ ID NO: 39636 - DNA, 313 bp, Oryza sativa
  Clone ID: uC-osroM202018f05b1
ggaaccttgccaggatttttttttctttttggttctcattcatttcgagaataacttattttgatttcacaaggatgaccggttttgataccaacgaatttacagacttttgggttacaaaacaaaatagttccgttacaaaaagaaaaatttgaggggaaaaaatgaatttttcctatatgggacattggccgcgattttttacaccgcaaaattattcctttattgaatatataagctttgggcccctcaaaaaactttgaaggctttatttctgttccctggcaataaaacctcgggctggaaaggttaa

SEQ ID NO: 39637 - DNA, 452 bp, Oryza sativa
  Clone ID: uC-osroM202018f09b1
ttgtttccacccacgaacgcttcgccgcttgataaaccaaattccccaccgccgcttcgttctcgccgatccggagggctcgagatgaaggcgaggtcgaggtccagcaatggcgactccaggctctcggtgaggaagaccaaggcggagaaggacccgaacaagccgaagaggccaccgagcgcgttcttcgtgttcatggagcagttcaggaaggactacaaggagaagcaccccaacgtcaagcaggtctcggtgattggcaaggctggcggtgacaagtggaagtccatgactgatgctgacaaggctcctttcgtgaccaaggctgagaagctcaaggctgagtacaccaagaagattgacgcctacaacaacaagcaggcaggaggcccggctacctcaagcgactctgacaagtccaagtccgaggtgaacgacgaggaccaggg

SEQ ID NO: 39638 - DNA, 399 bp, Oryza sativa
  Clone ID: uC-osroM202018f10b1
ttgtttttgcaaccaaccaccattatattcttcatactacctgcgaagatctccattcatggacgttccctacgaattaaatgcacacgagcaaaccatgcagccacagcgaatctgtccccatgtcatactgtaccttctcgtggaaggcttttcgccttttcggcgccgtcaaataccaaggccccaccgatcagttaaaaaaaaatactcacacgatcacacgatgagtccatggaggaggtaaaggtaaagatcgtgatcgatcacgcacctggtccgtcgaggcgggtgaggaagaggcggcgccacgaggcgaggtcgtacgcggcgacggcggagtacgcgaaccgcggcaaccggtcggcgtagacgatgagcaagcgccccctcggcgcg

SEQ ID NO: 39639 - DNA, 558 bp, Oryza sativa
  Clone ID: uC-osroM202018f11b1
gttggtctccgcccatccttaggaaaccacccgcccccggtccccggaggaaagcttcggccatggcggcggcggcggcggctcggaggggatgcctggtcgcgcttctggcggtgctcttcttggcctgcgccgctgaggggggtgcggcggcggcgtcggcggcgcagcagcagcagcagctacggcggcggaggcatctgctgcggcggcagcggcaggtgcacagccacctcaggcggctcaacaaggcgcccctcgccagcatcgagagtcctgatggagacatcatagactgtgtgcacatctccaaccagcctgcctttgatcaccctttcctcaagaaccacactatccagatgaggcctgattaccacccagaaggcctgtatgatgagtccaaggttgcatcacagcagaacacccagacaatcacccaaatgtggcacatgaacggcgtgtgcccggagaacaccataccaatcaggaggaccaagaaggaggatgtcctagggccagcttcataggagatatggcaagaagagcacaagagcaccc

SEQ ID NO: 39640 - DNA, 357 bp, Oryza sativa
  Clone ID: uC-osroM202018f12b1
tttattttctccaataatattccttcaaggaagccgcttggattcccacatcggagatggcggcttcctccggccgccgccacgcgccgccgtcgggttaggaagggctcgaggttggagaggcaacaatggcgatcgcttcgtcatcgtcgtcgatgctgctgctgatgtttcttgcgttcttggatcatggcgccgcggtggcgaacctgtcatccatcgaggccgccgtccgcgaccgcgcgttccagctgttccgccgcacgagcgagatcgtcgtcgtcgacgtcccggcggagctcgccggcgccggcgtcaaggcctcggcgacgcgcgggcgccagatcgcccctgtgg

SEQ ID NO: 39641 - DNA, 544 bp, Oryza sativa
  Clone ID: uC-osroM202018g03b1
ctttcgtttacacacacacccagatccacagccatcctcccaccgccgccgccaccatctccaagcccacgaacacccacagccaccgtgagctcgagcgaggtaagaaaagctttagatctgagcgacttcgagcgtcttcaaggtaaagttttctcgaaaccctcttcttcttcttcctcctctggctcccccacctgttcttctacggtttcttggttaggttgcttgcagagagcgagagacccagggccttttagatccagggctcccagatctgctgtttttctttcatcttctttgtgttctagtgttaggttggtagccaagaggggttctttttccacacctcacttgctagatctaccaccaaaaagccatctgtttttttactgtggctgtcgatttctccctccttcctgcctgttcttgattttggattcggaaccaggcaaatctttgttactactggtttagtatcagaaaaaaaatcccaaaaaaaaagtgagtagatggctgcagcatagatctgtaggggaggagc

SEQ ID NO: 39642 - DNA, 132 bp, Oryza sativa
  Clone ID: uC-osroM202018g07b1
ttttttttggaaatactttagaaagcttgagaggattcgacagctatactttcattgttcaattcactgtaaaatgcagatttgcaactggtgccggctagaatataatggaatagtagactatttcggctt

SEQ ID NO: 39643 - DNA, 384 bp, Oryza sativa
  Clone ID: uC-osroM202018g08b1
agaaaaatagaattggattccccagagaaggagattgaagcgtctgacttttgcatgcgggcagtatatgttcaatctcatacagaatctaagttcgcattgtacaatttgcagctacatccaaatgaacaattcgactttgtatgccaattatgagccacaacaaatcggatctccaaaactgtaacagtataatttcacttagtaaacactaatgtatatatacatttagtagaaaaaagaaactaagattaccatagttcacagatgctgcataccattatccaaaaaaaacaggtgatacatgcagcttactgtgacctacacaaatggcagtattaactagtactataacctacagcagcggccagaagtgaaggaacc

SEQ ID NO: 39644 - DNA, 371 bp, Oryza sativa
  Clone ID: uC-osroM202018h02b1
gcctttttaccggcgccgccgcctcgacgccgttgacgccgtcgaccggcaccggaccgtcgtctatctaccgcaaatatacctgcgcgcgctccctgccactgcacccccaactctgccgaaccgcgcgccacgggctgcaagagggagagggcgacgcgaggaggcccctccaacggacgacgtcatgctctctttctcactcgccgtgctgatgggcgagacagttgcgctctgtgaggtggctctcccccctccaggatcctctccggaggctgccggcacgcttctataacgagtgctagattaccgagagctggtggttcggaagccctaacgttagcttgggtggaattctccgggcgagctct

SEQ ID NO: 39645 - DNA, 482 bp, Oryza sativa
  Clone ID: uC-osroM202018h03b1
ctctagtctctgtctcgtcgtcctcgcatctccactcgccatgggcaagattaagatcggaatcaacggtttcggaaggatcgggaggctcgtggccagggtggccctccagagcgaggatgtcgagctcgtcgccgtcaacgaccccttcatcaccaccgactacatgacctacatgttcaagtacgataccgtgcacggccaatggaagcacagcgacatcaagatcaaggactccaagactctgctcttgggcgagaagccggtcaccgttttcggcatcaggaaccctgacgagattccgtgggctgaggctggtgctgagtatgtcgtggagtccaccggtgtcttcactgacaaggagaaggctgctgctcacttgaagggtggtgccaagaaggttgtcatctcagccccgagcaaagatgctccgatgtttgtctgcggtgtcaacgaggacaagtacacttcagatattgata

SEQ ID NO: 39646 - DNA, 553 bp, Oryza sativa
  Clone ID: uC-osroM202018h05b1
gcttatctagagctcttaattagctagctagtgattagctgcgcttgtgatcgatcgatctcgggtacgtagcaatggcgtccaaggcgttcgctctgttcctggccgtgaacctcgtcgtgctcggggtggcaagcgcctgcggcggcagcccgtcgtgcccgacgccgacgccgtcgaccccgacaccgtcaacgccgacgccgacgccgtcggcgttcgggaggtgcccccgcgacgcgctgaagctgggcgtgtgcgccaacgtgctgggcctgatcaaggccaaggtgggcgtgcctccggcggagccgtgctgcccgctgctggaggggctcgtcgacctcgaggcggcggtgtgcctctgcacggccatcaggggcaacatcctcggaatcaacctcaaccttcccatcgacctcagcctcatcctcaactactgcggcaggaccgtccccaccggcttcaagtgctaagcagcgtgcatatgcaatgcctgcatgggttgatcctacgtacggtgattagtttgctttgacgactcttgatttga

SEQ ID NO: 39647 - DNA, 380 bp, Oryza sativa
  Clone ID: uC-osroM202018h07b1
gtcgatgagtaaaattcttttattcaaaaatcgaaaataatttcgtgcatcagtgaccaaatgaattcgaaaactttgttgaaattttacggtttgtcccaggcaaagtccggatccgattcgaaaccatgcgaaatgaagaaatcatcagcttcgctgggtccacgcgaaccaaacacataactgtacggcttcttgtgttgcttctcaatttgatgaagcagcggcgtgaatactctccacgcctcggacaattcgtctgttcgtacgaaattcacctgcgaaccgtcaagaacttcaccaatcaatcgttcatacgattcgggaatctgagcgttcggaaattcgtcctgataaacaagatttaattgagttggatg

SEQ ID NO: 39648 - DNA, 463 bp, Oryza sativa
  Clone ID: uC-osroM202018h09b1
ttgttcatgagggtgaaattgcctcatcttatccgtgctgtccgcaactctggacagattgtcacatggattactgatcccatgcatggaaacaccatcaaggctccatgtggtctgaagactcgtccatcctattccattctggctgaagtacgtgcgttcttcgatgtccatgatcaagaaggtagccacccaggaggtatccacctggaaatgactgggcagaacgtgactgaatgcatcggtggatcaaggaccgtcaccttcgatgacctgagcgaccgctaccacacccactgtgacccaaggctgaacgcgtcgcaatccctggagctcgccttcatcatcgccgagagactgaggcggatgaagatgctgtccggggtcaacaacaacctgccattgcccccattggctctctaaactgctgaaacggggaagggaaaaaaactgggagaggggg

SEQ ID NO: 39649 - DNA, 448 bp, Oryza sativa
  Clone ID: uC-osroM202018h11b1
ttttcattatgtacgctcctcctgaggcaaaccccctctaatccacagcctttttctgctactccttcctctaaaacaacgaaaagttcctgctgccagtcatgagcaacagatacttcatcaacatcaagaacaacttcgccgagatcaaatcctcccaaacatacagaaaccctttcaaaagagccctggagatacactattccatccccactgatcctcatttctgtgtggggagggtgattgccatctatgatacggtcactgtggaaggcatcgtcaaggagagacaggtggtcaaggctgaatacaagtaggccaaatagaagggaaatactgtcatgatggctattagttcggccaatgagaagtcggtgctgaaggtgcgtttgggaaacttgccggcaggcgagagtgtccgcattgagtttgaatttgttgggaaatt

SEQ ID NO: 39650 - DNA, 355 bp, Oryza sativa
  Clone ID: uC-osroM202019a01a1
aattagaagggctctgtaacaggggggggaataaataatttacggactttttagatactaataaccaagcacaagataacaccaccaggtgagtgggatacattatcctcccatcactagacgggtcgctgaaaagtacgaaacacatacggcgaaattgtacattttatcttggactatatgtatctctgcacaggagaataccccattattccattgagccacacaaatggcaacactggcgtatctggccacgcaaaatgagcggctccatcaccagcaagagttcctcccacccccttcccaaaatcacggcggtagtaagaaacatgaccacccggacgcgtgggtggac

SEQ ID NO: 39651 - DNA, 537 bp, Oryza sativa
  unsure (1)..(537): unsure at all n locations
  Clone ID: uC-osroM202019a03a1
caaaagcctcattttggatggatttgtttccccccacggggtgcatatacaatagagtgatctcacgcttgtgcatgcttatatatagctggactctatgtacatcaatttgccaattaggagactaatacgtacgtatagcagaacaaatcaagcaattattaccatctaattgattatctaaacaaaatttagatcaattttatgaacttgcttcacttgttcggggccgccgggccgacgccgcgccccatgtaggacgtgatcgccgccgccaaaaccgactggaagctcgggtccgacgtgatcgccttcgcgatcgtgtccgtaacggccgccggagcgacgccgccgccgtcgatggctctctgcaggtacggagacatcgtctggccgccgaacagctgttccggcgccggcctcgccgccggcgtcgccatgcccatgatgccgaaatgatggccgaacggcaacggngcaacgcccttggcgtagtatggctgngccgtcgccgngccgccgtacgccaggtacccg

SEQ ID NO: 39652 - DNA, 425 bp, Oryza sativa
  Clone ID: uC-osroM202019a04a1
gaaaggaaattaaactgatttatggcgggttccattaaaaccatggcactcgggtacgtggtgaaaccgtgaaagttaaaaaacaaaaacagtagtagtagagtgaggccctgctcgctgttacatgagaggtgcacgaagaaccagcacacgagcagagcatccagcccacacgcagcaaggaaacggtagggatgccgccgccgccgccggccgatccgccgcccggcgatgatgcgtcgtcgtcgtcgttcaggtgcacgcggaggcggagcggcgtgcggcgcggcgcggtcgagaggtgatgagtagttgacgcggagcagatatatatggatggatggcgtcgtcgtcggtcggacgacggagaggtcgcgcgcatcacgcgcgggcgtagctgcgggcgaggtgggcggcgcggaggt

SEQ ID NO: 39653 - DNA, 432 bp, Oryza sativa
  Clone ID: uC-osroM202019a05a1
gggggaaattgaaacatagggggaagtataaaggggacctttccaatcggacaaatttttggacaaaatcagatcagagaagggcccaattcgagggggcccacataacctatcacaggcccacgacccatgacgggccactggtattgctccatcgatggcgcacacgccaaaacggaagaaaatatacaggggaccatatatgttggggaaactaccgttagatcgagaaataaatgttcgagaatcatccacgttatcacgcacaggaaaatttttactcacgagtaaatctgggagtaaaatttttactcgggatgacgtgaacaaatctcaagcgtctattatttaatctaacggtagttttcaaggttccatcgtgtacgtggtttccacccccatattttccccaaaacggggcacaccaaacgc

SEQ ID NO: 39654 - DNA, 478 bp, Oryza sativa
  Clone ID: uC-osroM202019a06a1
gaaagtgaacattccatgggggggattatcatatcttggtgaaacccctcaaagggcaaccaagtttattttaaattgcacaggcgaacgtaggtacatctaacaattgtacaagaccgcataaacgaatgccgtgggattgtggacaattattgttgaagtctcggtgttttaaaagatgtaccagggcacatactgaatttttctagatgcttgagagctaaacataagaaccagatatggagagagcttcttgcgatctctaaggcatgctctacagaagatgcactacagagcttagctttggctacaacgggctgagacttaacgagttgaagattaagcgaaaattcctctgagctaccactctcaaggagaacaccctggagtcgactatcagagtcaatccagaaggtagcaatctctggtgcaaagcttcccacttcaattgttcggcaacattatcaccgaaaattgc

SEQ ID NO: 39655 - DNA, 352 bp, Oryza sativa
  Clone ID: uC-osroM202019a06b1
ttcagctctacggcggaaggcggcggagatggcttggacggccgcggcggcgtcgtcgaaggggtgcatctcgtgggcgctgcggcagcgtgggcttggtggtggtggtgcgcgggctgtcccggtgcttccccgccagagattctgcgtctccgcggcggcgggtgcggggttcgacaacgagaatcgcgagtatgtgatcgtgggtggaggcaacatatccacctacacgctctggacgttcgacgagcacggtatggctgatggccgcctttgcatcgtctccaaggaggcgtattcggcatatgagcgaccagcactgacaaagggctatttttttcctccagacaag

SEQ ID NO: 39656 - DNA, 474 bp, Oryza sativa
  Clone ID: uC-osroM202019a07a1
gggggcggatgtcaacatgtttaactttaggaagacaagtatacaaggcaaaattttgttgacaactgtacaatgagatcaaaacagtttattgttttacaagatcagttcttaatcttagatttatatgctttccatgcttgtccacatgcctgaatatttgctgacgcttgatttaagaacttggcaatgttttcttcatatttatccaccaatgcagggatggtgagagcaagaacaaggcatgcatataccaaagtaatgagatcagtcacacggccaactatggagatcagcagtaatactgaagccatcttgtaaaagagactggagtcctttccgtgtgcaatgttttcaaaaccctgtagtgccttatgtaggatgttacccactgcagctgctgctttgctcattgagtcttcagatattttgatcagtggaacaggtggaggtggcctgttgagcagccgcgcg

SEQ ID NO: 39657 - DNA, 519 bp, Oryza sativa
  unsure (1)..(519): unsure at all n locations
  Clone ID: uC-osroM202019a07b1
tcaatggatgcctctgaccaaggttgccggctgctcggcgcccagagatcgctgcacggcctcctcggcggcggcgccagtgagctaagctcagttatcttcttcagttcgcccgccgtagatcgcctcccctgcgggctgtggttgcgcggcttcgtttgcattttgcgttttgtgatgtggtgggttttgtgggcgccgcagtggcggatgtggtgctgtggaggaggaaggaggtggccggctggtcgctggcggcggtggcggcgtcctgggtcctcttctactgcttgcctggctacacgctgctctccttcgtgtccagcgtgctcatgatcgtgctcgccgtcctcttcgtctgggccaaggccgcgcggctgctcaacaggccacctccacctgttccactgatcaaaatatctgaagactcaatgagcaaagcagcagctgcagtgggtaacatcctacataaggcactacagggttttgaaaacattgcacacnngaaggactccagtc

SEQ ID NO: 39658 - DNA, 168 bp, Oryza sativa
  Clone ID: uC-osroM202019a08a1
agaacatcacagattcaggggggctcttataaaagcagggggatctgaaaggattcaccacaaacaatagctaaaaccgaaagggcaccgactgtgaacaaacgtactgaaacagattgacgacccagttagcctctaacattggggataaaatagaagatcctgtca

SEQ ID NO: 39659 - DNA, 528 bp, Oryza sativa
  Clone ID: uC-osroM202019a08b1
acgcatcgttttgcttgatacccttcttgttcagagcctacgtgattaagctaagcctggtttaatatttcgagatcggtaacgacgatcgatcgaacgccgcaatggacgtcgtcgtcgagagcccgccggtgagggacgagaagaaagtcgacgtcgccgcgattggaggcgcgcctccaatagtctttgagagttttgcaccatcgacgcagagagattcaaccatcatcaagaaggaggagaagatggaggcagcgaatgcggagatgggcgaggtgagggaggagaacgagcggctcaagacgatgctcacacgcatcgtcagcgactacaagtcgctgcacacgcacttcctcgacgtcgtcaaggtcaaggagcaaacggcggcgttgcctccgacgacgacgacgacaagcaggcgagccgccgcgcgttgccgacgatgcccgtgctgaacctcagctccgacagcagcggggacgccgccggcgcctgcgccggcgagcctacccagctcgacaaagc

SEQ ID NO: 39660 - DNA, 421 bp, Oryza sativa
  Clone ID: uC-osroM202019a09a1
ggtggcaaaacaatataaatatccgggcccacagggtaacaaatataaaagggggtttttttatggcccatactccataccggggtttttattattggggctgggggcatactaagcgggggcaaaagttttttcattccatagggaaaaaactattattttccttcatccgtttaaggatataaaactttttagtttggcccattttcatatagattttaaggaatctgggctgggttaccctgatccgggtgcatagccatgtttccgaatgggatccggaaagggaaacagatcccctccgaaacgtatcccggacgtatcccacatatttgggatttccaaaaaaataaataaatcagggtcccccagggataccccacgacctttctccgtttttgctcgcaccagggataccccc

SEQ ID NO: 39661 - DNA, 523 bp, Oryza sativa
  Clone ID: uC-osroM202019a10a1
gcagatcaatctgtattgggggcatgattaatgcttgggtacacttgcacacttcaccatatattatatatatatatataaatatatatatatcatcagcttcttcatcaccaaattcatgggcaattcgagttcttccccgggccgccatagtagaagtaggtgccccagtcgccattgttgccgttctgaacatcgtagcaattggactgctcggtgtaggtgcccacccccttgggggccttcagctggttgctgctgtccaccacctggatgttcttgaagtagctcgccttgccgaacccttcctccgggaaccgcccgctccccatctgcgtcgacgtgtgcgtgccgtcgggctccgagttcaccacctccccgccccactcgaccatcgacgcactgtcgacgaggtaggagaagaggaaggacggccagtagccgaggacatactccctgccgaactgcattcaccagtttccttcctttgggtccttccagatcaaaatactgatattatact

SEQ ID NO: 39662 - DNA, 443 bp, Oryza sativa
  unsure (1)..(443): unsure at all n locations
  Clone ID: uC-osroM202019a10b1
actattgggtatgctgatacgtgtgccgcctccgggtacgcggtccggagttccgagccacgacccactcgtgcgctgagctgaggtgaagtgctgctgaggcgagtgactgaggtgcagtgagagcggcgagaactctggccgcggcggcggcattggcgctgtgggcggcggctgcggagggggcaaggtcgccggcggctagggtgcaccggcacctcaagaggctcaacaagccggccgtcaagagcatcgagagcccagatggagacatcatcgactgcgtgcatctctctcaccaaccagcatttgatcatcccctactcaagaaccatactcttcagatgaggccggcctaccaccctgaaagcttgtatgatgatgacangagaagcgtggcctctgacaatgccggcgagaagccgatgctccagctattgcat

SEQ ID NO: 39663 - DNA, 489 bp, Oryza sativa
  Clone ID: uC-osroM202019a11a1
gtcgcctaccggtgcctcagcgggagccccaagaacggggccgacatgtccgccgggggcgacgcgctcgagccgctgctcgtcgccaccgacgacgtccccctcggccccgtcgtgctgttcgtcgcgccggatcaggaggccgacgccgccgccgccgccgacgacgacgaggacgacaaggcccggcggcggcagcggcggacgcggaaggacgagcagcaccgccgtcgcagtcgcctacggacgtcgcccaagggcagcccgaggaagcccgtcgtcgccgccgcttgccggaacgaggagttctgggtgtggcacgttcccgccgaccacaaggcgtgagcgagtgacacgtggcgcgttgcatcgcacgccatgtcagccgccgctgtgctttgctccacgtgtgcgacgaacattgtgtgtgtgtgtgatgaggtctagtactaacactggcgatttgattaggatgtgcatgcattcctg

SEQ ID NO: 39664 - DNA, 440 bp, Oryza sativa
  Clone ID: uC-osroM202019a11b1
tttggtttgcactgtgatcaacgaatcaaatcaaacagtgggttggattaaagaagacgagacctgataagatattttctgatctgatcttcgttgtgctgtgaattatgaattgatcgctctctcactctgcatctcactgaaacaaacagagtacagggatgcatgcaaatcctaatcaaatcaccagtgttactactagacctcatcacacacacacacaatgttcgtcgcacacgtggagcaaagcaaagcggcggctgacatggcgtgcgatgcaacgcgccacgtgtcactcgctcacgccttgtggtcggcggggacgtgccacacccagaactcctcgttccggcaagcggcggcgacggcgggctttcttgggctgcccttgggcgaccatccgaggcggctgcggcggcggtgctgctcgtctttcgcgt

SEQ ID NO: 39665 - DNA, 551 bp, Oryza sativa
  unsure (1)..(551): unsure at all n locations
  Clone ID: uC-osroM202019a12a1
aaccaagggagatgcgtgccttttattttactatcacttggaacatgagcttccatgtacaatgttcagttcttaattacactgcactagcatctaatacgcacctatcgcgaaagaattttgctcacccagccgacctagtaacaacaccggagagacattatgttacactcaaatgccctaacgtgagcaactagcggtcgagcaccaatgcaaaactatgatgcatcggaagcgtctatgaagtgaggatattcgtatttaagttttttgtcctgaatcaaatgaaaaacatattgtaccactagtttgcatcatataattgtggattatcatcagctctcactcctgtttgaatctatctcctccatatgatatgtatgtacaggtatacaagagtaacaaactgttctctcttacatttactgctgataacaccagtgatatgagggcttctgtagtatactaatgaacattgccgaatgggcaaatgccagagaaaccaagcttatgactttgacaaatatcctctcatgctttctncaagcact

SEQ ID NO: 39666 - DNA, 538 bp, Oryza sativa
  Clone ID: uC-osroM202019b01a1
cggagggagccactattgaaggtacaaaatacatatacataggaaataatagccaaaccagtttaatatattcatcacttcatctgtggatacaccattacaagcatagtacgtgaatagtgaaaccaataacatagcacatcgattaacccatcacacacacacacacacaccatatatattggtcaagcaccaacccaaatggccaagcttctttatttttctgcatcacaattcacatagatggtagatgcaggcaggcatcttaacagttgcaagggttgcacctgcagctggaaccgcagctgcagccatgggcggtctcgccggactctgcggccgcctcaaactgctgcgccttcttctccggcgccacacccagcacgacggtggccttggtgctgctgctcttctcttccaggtcagggtacttctttccgcaggagcagtttgagccgcagctgcagctagatccacagctgcaagacatcttctctcagtctgaattaagctcaagccactgaagatgaaatcaact

SEQ ID NO: 39667 - DNA, 570 bp, Oryza sativa
  unsure (1)..(570): unsure at all n locations
  Clone ID: uC-osroM202019b02a1
gtaagaacatgtagcagcaggtacaattaaatgaatagcctctcgatccatgtccaaatatttggaccgaacgaacattgccatacaaagtgtgcaacatccttccttgcatgttgctacaatcttgacaaaccgatcgaattcagttttcaacctgattttacactcttcttcatcaactttacagaaccgtggatgattttttggttacaccggcagcagcaaagtgggaggggggaaaagaatacgcggcgtcagaatctcggacaaaaaaatgtagttccacttccatatgcaccagctttcccaaatggctgcacacagggttcatctctgctttctaatggaggacggtgaagaaattctgaactagttttcatgctgacctcagaaatcaccatcctacaaacgcgcattgctttcgagcatgttcggggataagcttcaccaggaattccattggcatacccttcagttcatggngcttgaaagtgaagagaggaggaaggaaacggccgttcggtaagcgggtgtttggatcacggagttcatcgaagaaggatggatcat

SEQ ID NO: 39668 - DNA, 396 bp, Oryza sativa
  Clone ID: uC-osroM202019b03a1
gaaaggaaattaaagtgatttatggcgtgttccattaaaaccatcgcacttggatacttggtgaaaccgtgaaagttaaaaaacaaaaacagtattatttgagtgaggccctgctcgctgttacatgagaggtgcacgaagaaccagcgcacgagcagagggtacagcccacacgcagcatggaaacggtagggatgccgtcgtcgacgccggccgatccgccgcccggagatgatgcgtcgtcgtcgtcgttcaggtgcacgcggaggcggagcggcgtgcggcgcggcgcggtagaaaggtgaagagatggttgacgcggagcatatatatatggatggatggcgtttatcgcggtcggacgacggtgaggtcgagcgcataacgcgcgggcgt

SEQ ID NO: 39669 - DNA, 556 bp, Oryza sativa
  unsure (1)..(556): unsure at all n locations
  Clone ID: uC-osroM202019b04a1
cactcgcaaaccacatttgtggggacattaccaaaccaaagccatcaaccgttatttacagatgatcatctctacccctccttacacagctactccattctccaagaacagagcacacgaggttaaataagagcgaagcatactgcgaccacatgattacagcattacctggccaagctcgaagctgccacgggttcaaccctgcagccaccacctccttgccgttgctcgcggagatacccaagcaaagtttcagccttgtgcttggcacgggcagagccggactgcgagagcgcgacaagcggtgggatggcgccctcacggacaagaagcgcgcggttgcgggggcactcggagcagagctgcagcagcgccaccacggcgaactccctctccctcgccgggccgtcctcgatggtctcgacaagcgccggtatcccgccagcctccaccacggcgtcgcggccctcgacgatgcctgcgaggctggcgaggaccaccattgcctttctcgacgtcccgctgccacgctcgccganaggtggatgagcggcac

SEQ ID NO: 39670 - DNA, 617 bp, Oryza sativa
  unsure (1)..(617): unsure at all n locations
  Clone ID: uC-osroM202019b05a1
ggcggaccaggtcgttgttgagggcagggatggcctgctggggtggcgggaccttgcgcggtgccacgccggggagctgtccgtcgccgtcgtgcaggggaaccacgtgctcgaggaccagtgccgcgtcgagtcgggcccgccgcccctcgccgccacctgcatcggcgtcttcgacggtcacgccggccccgacgccgcccgcttcgcctgcgaccacctcctccccaacctccgagaggccgcgtccgggccggagggcgtcacggccgacgccatcagggacgcgttcctggccacggaggaaggcttcctcgcggtcgtctcgcggatgtgggaggcgcagccggacatggccaccgtcgggacgtgctgcctcgtcggagtcgtgcaccagaggacgctcttcgtcgccaacctcggggattccagggccgttcttgggaagaaggttggtcgcgctggtcagattaccgccgagcaactgtccagtgagcataacgccaatgaagaggatgtcaggcaagagctcatggctcagcacccagatgatcctcagattggtgctcttaaacatggngtttggagagtcaagggcattatacaggtgtccagat

SEQ ID NO: 39671 - DNA, 438 bp, Oryza sativa
  Clone ID: uC-osroM202019b05b1
gaaaacaaataatccatgtgacaatgtatttggtaagatttacaccattgaaacaagatgagtgacttaattgagcaatttgctagatgagtgactaaactgcactcacctcgcaagttgtgataccaacggtatattttactctatgattattatcaagtagtacaaataatcactaaactaatgatcccagaaactgtccagtggataatcaagtagagatcagcagttttgtatgctgcagaatgtggtgtcgatatccgctcagaaaaaagaaaaagcaaatgtggtgtggatagacaaaccttttttcctcaatacaaaagaaactagctttatgtaacgagaacaaatgaatcaattaaaaaatacatgataatccttaataaagctccctcactttaggcaaaagttcagctttaggaatatgcacattta

SEQ ID NO: 39672 - DNA, 542 bp, Oryza sativa
  unsure (1)..(542): unsure at all n locations
  Clone ID: uC-osroM202019b06a1
aaagcaggcaaatgtataccatggtacataaatcagccaacttggttcacaacaggggacttaatagtccctgactaatcaaaaggcgaaggatatacatgaagcttgtacagctttgatcgttgaacataaattagaataaagttttttttccctgtcacctatctaacgtgtcatgatttatacagacgctaaccgcaaccagaaatgaaatggaagacatcccaagttcaaaactacaaagaaacagatagctcatctgggggtttcatcaactgtgaagcaatcgaaccagcagtagatatggatactaacaaatcctcctgttgtcatgaacagttaatgcttcaaacaaaatgtaaaaagctgagatgatatttaacaaatttcaagccattcccgtcttcaattattttcccttagttttctcaaaattcattccaatagcacccccgtctgaccaggntgatagatcaggagctttgctgactgtacttcctcattaaaacaaactagcatcaaacaaacatatagtccatgct

SEQ ID NO: 39673 - DNA, 589 bp, Oryza sativa
  Clone ID: uC-osroM202019b07a1
gtagatacgcaatatgagcacgaggatataacttaataagcacattacagcacacacatggccaaggcagttatttgaatcagtctccaacatacttcaaatcatagaccacaccatacagcaaacatagtataaacattgtcatagagagtacagctgatagcagcttgtaatattctagcattactttggtagcatccctctacaaaacatagcagacatcaccagctcttcatcttggccatacacattcaacatggtttgctagtgacagaccacactgaccagaacatttcgtctcctcagtaggcaccagctgccatgagcagctcatcaaggctccagatgccctcgttgcttgccccgtcttgtgtagcatcattttgcagaaggttgtccattgattcatctgagctgctctcaacataaggtaatggcaaatacttcatctcgggatcgaaggtgggcatgttttgtgcgagattaggcatgccatttccctggggcacggcgataccatagttgttcctcattctctttggcgctccacctgtcaggtaagcaggttcacatatgctggcatggcagc

SEQ ID NO: 39674 - DNA, 480 bp, Oryza sativa
  Clone ID: uC-osroM202019b07b1
ttcgccctccgcgtgagcggcagcaagtgttcactgcgttcttcttctcgatttatctttcttggtttcttgatctgtagcttattagcggccatgtgcggcggagcaatcatctccgggttcatcccgccgtcggccgctgcggcggcggcggctgcggcggccaagaagcagcagggcaggagggtcacggccgacgtgctgtggccggggatgctgcggaaggggaaggcggcggcggcggaggaggactttgaggccgacttccgcgagttcgagcgtggcatgagcgacgacgaggcggaggggggcggcggcgaggaggaagaggacgacgacgacgtggtcgtggtggtccccccgccggcggcggcgaggttcgtcgtccgtgccgcggccaaggcggcgcccccaactgcagatgggatgttgactacaaaacttgtccaacatgatggacctactgttagatcaacaagc

SEQ ID NO: 39675 - DNA, 75 bp, Oryza sativa
  Clone ID: uC-osroM202019b08a1
acgcacgcgggcgtacgcattgctatccatctactatacgagccggccgtctccttctttttttttttatctttg

SEQ ID NO: 39676 - DNA, 520 bp, Oryza sativa
  Clone ID: uC-osroM202019b09a1
gtgataaaaaggcagtgttgatcgggattaaatctccttgatttcattccacactcccctgctcaaacacctccagatccgaatgcgcttcttctctgatccactcaggtaggtgcccatcacattccagctcagcctgaagcaaggcaagttcgacagggatagctccctcaggacatcaatcgctggcagggcttctttttgagtctaccgcacattcagctcaaagaccttgatgaaagcgtcagatgcgactgcgagtaggtagtaggagcggccattcattagtgcccaggaaatgtcattaatggtcctggtttccttgatctttggcacactaattttctataggggcttggccaagttgttattgaaattaacaaaagccacagtgctgatcacctaaggcttcacctcctcttcctctatggcatctttgaatatcttcatcccattcagcactttcttgggtgatgattaaagatttttgcagcccactgcgaaaaagcctcatcttcct

SEQ ID NO: 39677 - DNA, 540 bp, Oryza sativa
  Clone ID: uC-osroM202019b10a1
ataaaatatttaatcatttgcggggaatcaagcattcaagctaacagatatcaggtgtacaaaatcaacctcgaaataatgaggtgatatgttgatacatgccaaacatttcaacattgaacagagttgtttaggtgtttaaaagtggcacacaactatatcacataacaatagaattaactcatgtaagtttatcagagtgttaatacaaaagaatgatcaaatacaatcaaatagcttgtaaccaaacagatgtctccaactcttcacacatagaacttttttggcttagccctacaaactggaagacttaaatctgatggtcggtgaaacctgatagaggctctggaatgaaatatggctcaagcatacatacgtgttctttcttgcttgatacagcagagtgaataaagttctcaagtcaagggcagaccaatatacaagccccaatcaataaccactcactccatgtcttcatctgctttacagaatatgatggtagaaggcatgcccaagcagggtgcacgtagaacaaaatta

SEQ ID NO: 39678 - DNA, 510 bp, Oryza sativa
  Clone ID: uC-osroM202019b10b1
tctttggcagtgcaaaagtcctggtgaaaggggaaccaaatattatatatatctgttctagatactacagagccccagaactcatatttggggctacagagtacacgacagctattgatgtgtggtctgctggctgtgttcttgctgaactacttctagggcagcctgtttttcctggtgacagtggcgtcgaccaacttgttgaaattatcaaggtactgggtactccaacaagggaagaaatcaaacatatgaatccgaactacactgagtttaagttcccccaaatcaaagctcacccatggcacaagatctttcataaaagaatgccatctgaagctgtagatcttgtgtctcggcttctgcagtactcaccacaccttcggtgcagtgcattggaggtgttaattcattcattcttcgatgaactacgagatccaaatgctcgcttaccaaatggcccgactcttccccactattcaatttaagcctcgtgagctgaaggagcat

SEQ ID NO: 39679 - DNA, 498 bp, Oryza sativa
  Clone ID: uC-osroM202019b12a1
ggggggaaatctccatgacagggacggatgcattatatatcttgtttttgggcataaattatttatcaactggccagcatgcctttcagaagcaccaaccaaatcaatctggcatggcgagagaaatcttcacagataatctgaccacaaatcagagctcaagacaagcaaagtaatgttcgcagatagactactcccaacagtttaatattcctgtgtcagaaatctcaaaattatgtcttgtatggcgaggatgcgcccccaccaacgctaccgcccaccttaatcaggctgccatcagcatttttctcaaacagatcatcgaagtatttgttagaagaaacataagatggcctgcgagctcctgcagacatcggttgcttagggctcccgtttatcggcgattgtggcccggcacttcgaagcggaaccccgaaagaatttgattgctgtagaggcctcaaattcagtggtacattaaccggcgaggcggaatta

SEQ ID NO: 39680 - DNA, 598 bp, Oryza sativa
  Clone ID: uC-osroM202019c02a1
ggcgcccgccgtgtcgaccgcggcgccgtcggagcccgccgcgggtgccgtaccggggaagccgacggtgctcgtggccgagaagctcggcgccgcggggctcgagctgctccgggggttcgccaacgtggactgctcctacggcctctcccccgaggagctccgcgccaagatcccgctctgcgacgcgctcatcgtgcggtcggggaccaaggtggggcgcgacgtgttcgaggcatccgggggaaggctccgcgtcgtggggcgcgccggggtcgggatcgacaacgtcgatctcgccgccgccaccgagcacgggtgcctcgtcgtcaacgcacccacggcgaacaccgtcgccgcggccgagcacggcatcgcgctgctcaccgctatgtccaggaacatcgcccaggccgacgcgtcgctcaaggctggtaaatggcagcgcaacaggtatgtgggtgtatctctcgttggtaaaactattgcaattcttggatttggaaaggttgggtcagacgtcgctcgtcgtgctaaaggtttgggaatgcatgtgattgcacacgatccgtatgcctttgctgatcgtgcccatgca

SEQ ID NO: 39681 - DNA, 502 bp, Oryza sativa
  Clone ID: uC-osroM202019c02b1
ggcaagcaaaaaatatatcacatagaacacagtaaacatagattaacagagggcttcttattaataagcaccatgttcaaacctaagccagattaatcaagacactgcatcaaactcgacaaacagcaccataacccaaaaaaggcttattccaacgagaaccatcagtcctctagatcctgattaaatagctagctacatcaaaattgcacaccatgtttgcagcttcaaacatacaacgcatgaatctagagcttgaggaaaacgaattcttcaatcgccggaatctccccaatctttgtcagtgtgctctttttaggttcctcatcaacaccaatcgccatgacggcatgcttgcgaggagcgattcttccaacactcatgaaactgacattaacattctcctcaccaaggacacttcctactgcgccgatcataccaggttgatcgacctgcctgcaaaggatcaggcttccttccaagctcacatcaacctggaatg

SEQ ID NO: 39682 - DNA, 528 bp, Oryza sativa
  unsure (1)..(528): unsure at all n locations
  Clone ID: uC-osroM202019c03a1
gtgggacggagggagtatttcatatgtattgtgatgtgaaattacttcctttcagttcctccaacctctctttttttcttagaattaaacgaacaaggcctcagatgattcagcacgtccagcagaacgggttgtgcgccttgaacgcctccacgacgccggcgatggatcccgccgaggcggcgacggacacgacgaggcacccggcgctgagcgcctggagggacagccactgcgcgctcccccgcggcacccggcgctgcgcgatgtacatctccacggggaagtagacggtgagcggccagaacgacgccgcgccgatgagccccaccatggagccgaagaacgggagcagcgtggacgccgccgtggtcacgcacacgaacgccgtgcgccacgccagacggaacgggctcacctcgatctcggccagggagcccacgcggagcacccgccttctcttgcccagcgccgngctcccgggccacgcgcccgtcgtggtgcgcccgtcgaggaacgcgaacaccg

SEQ ID NO: 39683 - DNA, 573 bp, Oryza sativa
  Clone ID: uC-osroM202019c04a1
aatgttaataacaactgggagcggaagataacataaatattggcttctcagtattatggttgtacagacttataaaagcaaacattaccagataactagcagctaagcctgaatacagctgcatcaagcaaacagctcaggaatcctcaattactcaggtcaactgccacgtaaacatacagaacattaaataggagtcatataagcacacttccagaacatgatataagcaaaagaaaagtttttaaaagatgtaaatgcatagcaagagattcctcagcctagtggttgatggctttctttgctctaagagattccagagccttctcgcgaagctcaatttcaagtttctgctgatccgattcgtctcttccattatatgaacctttcttcctagcatcagcatctgagtcagattcacgatccttctcaagatctgaagccatatcaacagtttcagcatgcttcagttttagtttgctggcctgacggtctgccttttacggtgccgctttcacgtctgcgcgtctttcctctttcgcacctcttctctcctttctcctctctggactc

SEQ ID NO: 39684 - DNA, 457 bp, Oryza sativa
  Clone ID: uC-osroM202019c06a1
gccacaaaaaggggggttatctccatgaattggtttcaatctaaacccaatccacacggcagacttcagtgttaatcagagttggtcctcagtctcaggatgatgcggcgattgtccgtgcgttgttctgctttcatagatcgtgctcaggcttgtccaggttgctgctgtcactgtccgccatgcggctcgagccacggccaaggagcccatggccgaagatagccctttgaagctgctgctgccctcactgaggttgtgagatcgacgcgaccgcttccgggtgagctgcggggatgacggcttgtcaggatcacaagcagaccttgtttgggccaccaccagccgtgagatgctgccccggcagaatgggcaggccagtgagggcggtgtcagggtcgtcggattgggtttgttgtgacagcacagtgccagcgtgcacggtgcacacatttga

SEQ ID NO: 39685 - DNA, 503 bp, Oryza sativa
  Clone ID: uC-osroM202019c07a1
ggaagcacagaacaatacgattagagcgcccgttacacacacttgagtacttgacgcgatacttacatccccaggttacgtacacacactagtagtagtctagtacgtaaaaacattacgcagaaaaacacgggacgggatgtacagcaccacgtacactaccgtacacatcccatatatttggatcatggcacgcgcagccgtagctagggaagtctgatccttatcaagcggtggcgatgggcgccgcgtggacaacctcgggggcggacttcatggccttgaagcgtggctccttggcctcgaacttggggcgcacgtacaggttcatgtagtcctcgaacacaaaccttgggtaggcggccgccgccgcgttggtggaggctagcgcgggccccgggaagatgacggcgtcggccccggggttgtagaaggaggcgatggacatgcggttgccgtcggggcgcgtgaggacccggtgcatgactcttttgtacctgccg

SEQ ID NO: 39686 - DNA, 490 bp, Oryza sativa
  unsure (1)..(490): unsure at all n locations
  Clone ID: uC-osroM202019c07b1
tctcagcttaagcgagcgagcgagtgaacgagagagagagacagagatggcgagtgttgcctccttcccggtgatcaacatggagaacctggagaccgaggagaggggcgcagcaatggaggtcatccgcgacgcctgcgagaactggggcttcttcgagatgctgaaccatggcatcgcgcacgagctgatggacgaggtggagcgggtgagcaaggcgcactacgccaactgccgggaggagaagttcaaggagttcgcgcggcggatgctggaggccggcgagaagggcgccgacgtgaagggcatcgactgggagagcaccttcttcgtccgccaccgccccgtctccaacctcgccgacctccccgacgtcgacgaccactacaggcaggtgatgaagcaatttgcgtcggagatcgagaagctctcggagagggtgctggacctgctgtgcgagaatctgngcctggagaaaggttacctgaag

SEQ ID NO: 39687 - DNA, 548 bp, Oryza sativa
  Clone ID: uC-osroM202019c08a1
gaacatcttcattgggagatatttacacccagatcgagaagcaatacgctgcctatcttaaacatctcctcgtcacaaaaatcaaacaaacacgaaactctctccaaaaagagaaaaaaaaattgaacgtaatcctatcccctttcggagcaataatatacaaacacaaaaaaaacactagtcctgtctccacatttccagttcttcttcttgttttttttttttcagatagacgtctgcgtcggcgtctctgacgatgagaaaggctccgtttcatcagtggtgctgaacgatctcatgttggatgaccgtgttgtctcgttctccttctgctggctgctgctgaccttgaggtcggcgaagtcggtgatcatggccggcctggtgatccggtgcaccgagaagtgcttctccccggtgagcatcctgacgacggtgctcatgttggggcggcgcgccattgcgtcctgtgtgcatagcaggccaatcttcaggaaccggcatgcctcgtcgacgtccaggtcattcccaggtcagcatcgatgatc

SEQ ID NO: 39688 - DNA, 392 bp, Oryza sativa
  Clone ID: uC-osroM202019c09a1
acgacaaaccacgaacttggatattaaagatgccacaaagaaggttcacataaacaacacaggtcacagcagcgaaagctacaagcaaaccctgcataatcgaaaagcaaatgtttttcaaaaccagacacacaaactgatagatagaagcccacacggacagatcataggatagcagcagtaatcaagcattgccaaggcaccaggcaagaaccctgaacctttttagtactcgtcaccctcatcaccctcgtcaccatcgtcgaactcggagccgacctccttggagtccttctccagcgcggggaggtcctcgcgggcctcggagaactcccccttcttcatgcccttggcgacgtaccaatggacgaaggcccccttggagtacatga

SEQ ID NO: 39689 - DNA, 487 bp, Oryza sativa
  Clone ID: uC-osroM202019c10a1
gccgccgtggtggaggcgccgaaggaggagacgccggcggcgccggccgaggctgtggccgaggaggcggcgcccgccgaggccgaggtggcggagaccaaggaggcggagccagctgcggccgagccggcggcggaggaggtgaaggaggccgagcccgagccggccgagccggaggccgagcctgccaaggaggaggtggcgccagagcccgccgccgccgccgaggcggaggccaaggaggccgagccggcggcgcaagtggccgaggaggtgaaggaggaggaggcggcgccggcgccggccgccgaggaggtgaaggtggaggaggcggcgccggtcgcggagccggaggccgagaaggccagcgagtgagtgcatgccggggaaggctggctcgccgtcgtcgtacaccgtggagtacatgcatggtccgcgcgcgccgtcgtcgtcggggacttgccggagttgtacgtacctgtgcgtg

SEQ ID NO: 39690 - DNA, 463 bp, Oryza sativa
  Clone ID: uC-osroM202019c10b1
actctcagaacgtgacacacccatatatacacgacgaaccgatcaaaacaacaacacacaagacggtaggttcaccgacggcgagaaatggttggcacacggccatgaacggctgagatcgcacacacatagagacagacaatgtactctcagaaacgcacccattacacgatgaaaaccaatcaaacacgaaaaaaaaaaagcacaaaagaccgacaaacaacgcctgcgacgacggaggcatgtgggggccagagaggggcaccgcgtcactgacgctgggccccaccgccctcgatgacaaactcttttatttagccccacgtcacgcgtacccacacacacctacggagtcgagtactaccactccagctcactcaactcatcactcgctacacgcacacgtacgtacaactccggcgagtcgccggcggcggcggcgcgcgcgggccatgcatgtact

SEQ ID NO: 39691 - DNA, 520 bp, Oryza sativa
  Clone ID: uC-osroM202019c11a1
ggtcaaaaaaaagtttaaaaagatgcttcatgtaagcaagtggaatgttctgttcatactgaaacatatatcgagtttccaataaagattacatgtataacaccatatggcttctatgagcaagaccaaaaaagacagtagcttacagtagtgcctatgatagattgatagtattagtagcatccccatgtgtccaaagaactagctatgtattcagccatggccattttgtccgtgaggtatgaagcaaccaaagaaccaaggcaccaatttcctttccaagtatttctacccgatttaacttctccacatgtagttactataaagtacaagttataggattttaatgagttgtgtgccgttgtcatgttgaaatttaatacatgccaccagctgctgcagattaggcttcctggtcgccaaagatgcgtttgcggaagtcggtaaccatgaagggaaggccctcacgcaggggaaccttgggcttccagcccaggagctctttcgcacgggtgatgtc

SEQ ID NO: 39692 - DNA, 524 bp, Oryza sativa
  Clone ID: uC-osroM202019c12a1
ctatagaagcgttattataacgcattttattcatagatcagcacaaattacaatactacaatacctgacacgacactacgactgacgacaccaaaggcacggattgttgcgtacgtatagcccttgtataagagcatatacatacatacatactagctagccgtgtgtacacagtatacacacagcagatgcaatcctttattgaccaagcaaacagctatagggataattaagtagctatacaagcacatcatcatgcatgtatagcagatacatatatctgtaaggttttatgtgtgcgtttttatttgtcataatccattattcgttcggttcttgcctcgtcgtgctcatgagcagcagccgtggcacttgcctttccacttgcagcatgggccgctatggccgctgcagtagctcatgcactctgccgtcatagtcgcagcaacctttacagttgcaaggcccgcacttgccgtctgcatggatacatatatatgggaaaatgagtcatttatatgggg

SEQ ID NO: 39693 - DNA, 562 bp, Oryza sativa
  Clone ID: uC-osroM202019d02a1
cttacacaagaataacaaattattttcttatagaagaataacaaatgacatagtcttctcatcaccacaaaacaaaaaattgaatgaaatgcacaaatgttctgttcactaagatgaatttaccgaacttactcccctgtatggacatgaatgtacaatcagagtatgcagacggtatgtctgataagttgtggcatgcatgtaggatcaactttatctacatgcttgccatatttacagttttaagtccaaatgggaaaccaagctgatatgttgtaaatgaaagaagtaggaccattccagcgctagctagagtatagaaatttgtatgagcaccctcatgtcctgcctagcttcaaaatatatttatatttgctccacattctactcccctgcttccaccatgtttaacattttctatcacaaataatggagtcagcatttcctctgatgatgtataaagagttgtcttcattgccactattggcattggacagtaccaaacaagtcaaagtgatattctagcatccttgcaaaaaaactgataatctagcataattgg

SEQ ID NO: 39694 - DNA, 507 bp, Oryza sativa
  unsure (1)..(507): unsure at all n locations
  Clone ID: uC-osroM202019d03a1
ggacttgtacgggcgcctcaacaggagcagcacgcgggggttcctcgcatacgtggcggcgggggcggcgtgcgccgcggtgctcgcctgcttcgtcatccccgccgccgagccgcgcgccggtgacgccaatggcggcctccgcctctcctcgcggtcggcgcgcgtctggccggacctcgcgttcaactggcgggtggtggtggccaccgtcgtcgggttcctcggctcggcgttcggcaccgtcggcggcgtcggcggcggcgggatattcgtgcccatgctcaacctcctcgtcggcttcgacaccaagtccgccgccgcgctctccaagtgcatgatcantggggcgtcggcgtcgtcggtttggtacaacctgcaggtgtcgcatccgaccaaggaggcgccggtcatcgactacaagctcgcgctgctcttccagcccatgctcatgctcgggatcacaatcggagtcgagctcagcgtcatcttcccctactggctcat

SEQ ID NO: 39695 - DNA, 545 bp, Oryza sativa
  Clone ID: uC-osroM202019d04a1
aatctgaaatgtaggcagatttgaatgaagagttgtaatgggtgcagaactataagcaaatttagcaacgcagattaatagtttacttattaattagtttaaactgctatgacccagcaaatgttcggacagcagtacagcacatttaaacggactcgatggtccactaacagcacaaataaagttttcacgaggataatgcagacacaggataacagtacagcagcaattccatcaatcaatgattactgaccacccctgaggcggagcaccaggtggagggtagactccttctgaatgttgtagtcggcgagggtacggccatcttccagctgcttgccggcgaagatcaggcgctgctggtctgggggaataccttccttgtcctggatcttagccttcacattgtcgatggtatcggagctctcaacctccagagtaatggtcttgccagtaagagtcttgacgaagatctgcataccacccctgaggcggagcaccaagtgtagggtagactccttctgatgttgtagtcggcaagggtg

SEQ ID NO: 39696 - DNA, 531 bp, Oryza sativa
  Clone ID: uC-osroM202019d05a1
gcataagcgtcagaaggtatttggttaattattagcaagccatattgtcactgagccacatactagagtaccaaatcatagaggaaggatgggagcagcaactgagcaaagctccatcctgcttagatacattcgagaggctttttttaggcttttaaccagccaagcgcaagcacttcagttaaagcctaaacagagttccagcatgatcagatcatgcgcattacttccacttcttgaacttgccaccaccgaacatgccgtgcccatgcttgccatgcttgaacttgccatgggggccgtgcttgccatgcttgaacttgccgccgtggtgaccgccgtagccatggccgtaaccaccaaagcctccatggcctccatagcccatgtgtccaccatggccatgagaagagatcttgtgtgccccataggctgcagcagccgcagcggcgcctccagccagcattgctcccatgtgtcctccaccgctactcccatggccgccctggtgcccagatgatccggggtagc

SEQ ID NO: 39697 - DNA, 463 bp, Oryza sativa
  Clone ID: uC-osroM202019d06a1
attgcagaatcgggaattaattagcttctcttttttttaattattaagcaccatttggcacacatggctagttacaacttacagttctctcaaaagacacacacagtcacaaagaattaatacagatcatcagccaaagaatagagagctctagctcttgatgcacaaccaaccaaccatacacacacacgcacacacaaaatgcacgttacatacatgatacgtcacgttgtcacggcgagctaagctatggcttaccgatttgcatcaggcgaccctgcagtttgccctgaccttgccgctgctgccggggagcacgccgacggcgcccatcttgaccatggcggcggcgaagtcgctctggaagggggaggcgtctttggcgtaagcgaccacctggacggcggtgttcttgtcgccgagcagcgcctggtcggaggagagcaggccccggttgttcatg

SEQ ID NO: 39698 - DNA, 467 bp, Oryza sativa
  Clone ID: uC-osroM202019d06b1
ttaagcatagccatagctagtgatcgatgtgtccgtgcattcctgtataaaaaagataggcgttgtagcgagcactatcactaagccgtatataaagagagcagtttagtactaaagtgagtgtgctagtgtgagcttagtggcaatggcgatgagaggcggtggtgcgacgatgctgtcgtggtacttgcaggtggcggcggtgagcttgctggcgatggcgacggggctggaggcgcagctgcgggtggggttctacgacaactcgtgcccggcggcggagatcatcgtgcagcaggaggtgagcaaggcggtgtcggccaacccgggcctcgccgccggcctcggtcgcctccactttcacgactgcttcgtcagggggtgcgatgcgtcggtgctgatcgactcgacgaaggggaaccaggcggagaaggacgccgggccgaacaccagcctgcgtgggttcg

SEQ ID NO: 39699 - DNA, 463 bp, Oryza sativa
  Clone ID: uC-osroM202019d07a1
gtacaggacaacaaaaaaaaaggggaatatatcacctctgtaatttgtacattctctttcgtttctagcgcaatccattttaattatacacatttgatttcccagagacaggatatcatatctgtatctcgaaagcagatcctctgacttaactgcacatgcagttgagtcactgacatgtgagtcccactttgctacgacccacatgtcagtgacttaactgcacagctgttaagtcaggggatccctttccctgtatctccagggatcccgcgcgacgaacctccggtttgccggcaaaaaagcaacggcccccaattctcctgcaccggaattcaacagctgagctgactgaccaatgcgctgcgccgggccaaaaccaacgaccggaagacaccacctcatcttcgggtgcgcaccgagttgagcctcccctgctcctggttcagcggcgcgcgccccg

SEQ ID NO: 39700 - DNA, 544 bp, Oryza sativa
  Clone ID: uC-osroM202019d08a1
gttcaaacaagacaccatactcatataaccatggacaaagaaatacaacaaccaatttgaactacagtcttacaattctaatattgcacctgacatgggtcacattgactttctcaaacaaaaatgaacaaactaactttgcactaacatatttactatctccccctaaaagtttatgaagtatctgcaacaaagtcctggattatggtacgaaccgcaataggaattctcacagagtgtgtgataccatcttgccatgtcaaacttccaaacgtgtagccaccttgcactctctgtcttgtggtgaatgtcaccttaaatgtcacacttctactaccgccattggtgaatttgatcactgaaggttccacagacatggtcataccgactggtgcctcaagcattgcatggtaagttgcttctgccactccgatgttgatgatggttcgccaaaccgtgacagagtacttgagatctggtacgacgatggatgggaggttgagctggtaaagttgcctcatgtatgactcacattcatccttgg

SEQ ID NO: 39701 - DNA, 476 bp, Oryza sativa
  unsure (1)..(476): unsure at all n locations
  Clone ID: uC-osroM202019d09a1
agtacaattcaccttcttggggaataaactatgtaacactactagccctaattatttggacaaaagagattctttgtccaaagaacacaaaaaaaaaatccaaggattacaagagtttgctttgttctcataaatatcaatgtgaaatacttacaccaattaacttagccacttatgattcacaaagataagatataactaactagcctatcaatagcaatttgagaggacccaccgtcttccaagcagcgtgccactttgttcttaagctcatttgctctttccctcatctcagctccctcatttttccccattaatttcataatcgctttctcaattttgcaccactctaactttccctcgagctcaaaccctacaccccacanccgttccacgtaccttgtatttatcatctgatctgcgaattgaggcctacatatcataagaactccctcacatatactctccaatatcga

SEQ ID NO: 39702 - DNA, 558 bp, Oryza sativa
  Clone ID: uC-osroM202019d10a1
ccagcaggggaacagaccatgacagccaggtgctccgggctcagagaccacactctcattgtcacagtttgccaagtggttattgctatgcaagaggcttggtgaaatggcatatccattttccatttgtccattttggcggagaccatggctgccaatatttaaggattttaatccattgctcagttccttgtcgacttgccttgagggaaaaacagtgtccgtttcgggcatcctgtggtactgttcaccactaattcgtggcacaacttgatttctctcaggtctcatttgattcaaaatcccaggtgcatgtttttcaacagcctgaagccatgcactttctaacctttgctcctcaacagtcacggctttcgcttgttcaacagagacttctttccctctagttctatgcattcctgtgttcccttcagtggtgcatgactgcaaacctccactagcagctgaagcacagctgaatttctccagttttttctcgatctcttcagattaatttaaatttcttgatggggttcgaattccctttagtcgatcact

SEQ ID NO: 39703 - DNA, 530 bp, Oryza sativa
  Clone ID: uC-osroM202019d11a1
ttttttttttttttttttttttttttttttggttttttttaatttttttgggggtttaaatattatttttttttttttattttatttttttttttatttatttttttttttaaaaaaaaaaaaaaaaaaaggccaccaaaaaaaatttaaaaaaaaaaaaaggggaaccggcaaaaaaaaaaaaaactgggggaaaaaaaaggaaccccacaaaaccgggggcaacaccccaaaaaatttgggaaaaaaaaaacccctgggggaaaaaaaaaaatatggggaaccccccctcccccaaaaaaggaacaccgaaaaaccccgggggggggttttggggagggaaaaaacccttggggaaccccaaaaaaatttaatgggaaaggggaaaaaggaaacccccccgggggggaaaaaccatggccaaaaatttgaaagagctctaggggaaaccccgccccaaaaaggaaggggggccccccccaaaaaaaaaacccccgggggcccccccgggaaaaaggctacaactttat

SEQ ID NO: 39704 - DNA, 464 bp, Oryza sativa
  Clone ID: uC-osroM202019d12a1
atgccataacttgatggcagggggaaggaagccacattattacttatcgaattaatattaacaatgccggaagatctgtactgtactatcaccttatcatttattatctacttaaaaacaaataccacatctctctatgctcatccctgcaactcccatcacctacctccgtatgaactaaactacaaatgccatgttctacgccaaattgtcgacaaggtcttttttttttctttcttcaaagacaatgagactgaaaacctgtacttttcactcacaacagctgctttgcaattgtacacacttctagacagcctgacatcaacaagcagcagcaggccagcagctgggactgggaagccgaatgccgagaaatgcgaaccggtcagacaaatcattggtggatctcgcatagcttccagtttcttcttcggcgatgagtttcagcttcaggaatggagggg

SEQ ID NO: 39705 - DNA, 477 bp, Oryza sativa
  Clone ID: uC-osroM202019d12b1
ttgtgccttccgatgccactagtgcagaagaaaccatttcatttcacgaagtggatattgtaacaccatcgcagaaactgttggctagcaagctgtcgtgcaatgtggtacaagggaaaagccttcttctgactggccccaacggtagtggaaagagctctattttcagagttctgagagatttatggccagtgtgttccgggagagttaccaaaccttcagatgggatgtttcatgttcctcagcgtccatataccagcttgggtactctgagagatcagatcatataccctctctcaagggaggaagcagagatgaagatttgttcgttatacaatgatggtaacgggtctagtgcttctaatctgctggatgatcacctgaagacaattctagtgaatgttcggttggtctatcttctagaaagagaagatgggactcaacttcaactgggaagatgttttatcgttgggagaa

SEQ ID NO: 39706 - DNA, 391 bp, Oryza sativa
  Clone ID: uC-osroM202019e01a1
gcattaacactttttaattaatgcggggcgcaaaatcaccaattacgggaattgaataatatctgcatcaatagactgttcattgggtgcagcttgtctgcctgaacctgaaccaccgattgttgaggtcgaactcccagaggtgctcctgctgcaggatgttgccgatcacggacacccccggccacgccctctcctgcaccctgatgcacttcacgccgggcgccgcgtggatcacggagcttttcgccgtgggcttcagcctcgacgacccgtcgaactgaaccgccagcttaggcacggtgaggtctcccccggcgtagacgtgggccgttcagctgtagcagtagtcgaacgggtccatggccacacgcggcagtccggcgagctg

SEQ ID NO: 39707 - DNA, 513 bp, Oryza sativa
  Clone ID: uC-osroM202019e02a1
cattgctgcaaacattatagcataggttcaatgtcaaaatattacaatcatcagttcatcacatcacaaaccagcacacatgtgctctccaagaattacatcaaatcggattgttctcttccacccttattagcaaggagcactggagatgaacacatctcacataagactagacaagattacaacacacattgcttattaatggtctagattaatgaaaacaacatgaagcaaaccataattaaacataataagcatcatcagacacaaccacagaggctagtactactagttgtaatgcagctgcaaccatgccattgatgccaatggccatggcgtgcgagctctccatggtggctcagaactggaaggcgtcggccatggcggtggcgaccatgggctgggccgcgaacggcggctgccatgggcggagcagcgggtcgtcggggaatctcgggatgtcgacgggcgcgccgccacctggaggatctccaggacgctgccgagcgcctg

SEQ ID NO: 39708 - DNA, 480 bp, Oryza sativa
  Clone ID: uC-osroM202019e03a1
cataatcaaaccaagattgccttaaggaaaagaaggctggtatcaagagcctctgcaggacaacaatcaatcatcataacaacataattcagctttactaagaatcaactgactctgtataaataaccagggtaaacaaaaggggtcaaggaaattgtaagttacttgtctcaagatatagtgcaagtttagtacaggtgctgaaatatgatcctcacaaaaaccagacttgtcccatctgcagggtaatttttcgcttagtacagacaccatcttccaagtggtaaaactttaataagtactaactgaagcacataaaggtttcagtgcaaggggatccctccaccagcatattcaacctcccgagcaggagccagtgaaaacacccaatctgatgcatttgttggaagaagacccaacgtattgagcttccatacacctaaacccatagctgccaagttgagagcaataaagaccaac

SEQ ID NO: 39709 - DNA, 345 bp, Oryza sativa
  Clone ID: uC-osroM202019e03b1
ccacgcgcacttcgcattcctacttacgagcgggtgaacccggtgagggagccttgagattacaaacgcctacaactcgctccaactgtcacccattttccattggtcctcaaattaagcacatccttgcaactcaggaccacaagtttctaagccttcctatctaactgggagatttctttcaggcgaaatttatcccccttcggatttcattttcgtatggacctttacacgcttgcacatatgtcacaaactgaccttgcttggtgaatttctacctggaaaaccagaggaccaaagttggctgcaatccaattccgacttattttgttggaaattcgaaaa

SEQ ID NO: 39710 - DNA, 569 bp, Oryza sativa
  Clone ID: uC-osroM202019e04a1
gtcacataaactttcaattattctcagtttgtcaatacttcctctgtaccggcaagccgaaaaatgaatgagcaaaaagaatctaaagaaaaaaaatatcctacaattacataaacatttctgtgaatttcgcactaccaaacatggccgtgtgatcgtcttcttcgtgtagctacttcttcaagctcaggcggcgccgttgcagagggcggcgccatcgccggcgttggccagcagcggcggcgccttgacgagcgagttctcgccctcgacgagcggcacgatcggctcctcgtcgtcctgccctgccttctcgacgtcctccgtgctgaggaagcacggctggttcgtcgagcagagcaccctcgcccacatcctgtccgtgatgaccaccttgttctgcttctccgtgatcctgtagaaggggatgtaggcgtggcggccattgacgggtgcgacggtgaagccggtgtacccggccatggcgccatggatggcgctgtgggcgagcagcgagcaatagacgttgtcggaggcgttggacgtaacggcgcgatcatgtacgtggg

SEQ ID NO: 39711 - DNA, 576 bp, Oryza sativa
  Clone ID: uC-osroM202019e05a1
gtcgattaacctggtatgagatcaactccaggttgtttgtcagtgaaatcccaagggcaatttgcgactattggttccccatatacactagcagttcatcagttgacatgaaaaactcagaaaccagagcttccctaactgatcggaacacatagatgcatcttgcaggggataggaaaggaaacaactgatcaggatccacaagactagacgtaaataaactacgtcaaacaagaaaactgttccttctcgctgcaaaggaaaccatagacctgcttcaagtttcctctagatggtcttgcattaacagcatatttgcaaacaaaaaccagcctcttcctcatctccaacttcgtgacgtctcctttcagaaatgaattgccatgatcaaagaatccatcgcaatcaaataatcgtgtaattatcgccaaggccacacagatgcttatatcctctccattttgacagcatattagtagcttcttccctgctatcaaattcctgtttgcaaagctaactgcttttgaaggtttttcatcaacgaaaaccggtcgttctttgatcccacccatagta

SEQ ID NO: 39712 - DNA, 469 bp, Oryza sativa
  Clone ID: uC-osroM202019e06a1
attaacggggagggcaaagcatcacatttcaatcttgtgttattgttgttgttgagtggagcacctaaactaatctatagcaataacaagaacaaacaggaggggaggagggaaacctcaatacagtgtttgtagtgcagattgggacggaaatcgaaatgatcagaagaaggcggtgccggccaatccccggtggaggaggttgtgccccatgtcgtccctcaccttgttggcggactccgactgcacaagcacggggtcgtcctcctcctcgtcgggggggaggtcgcaacggaggtcggggtccatgtcctcccccctggtctcgcaaatgttgtggaggacgcaacaagcggcgagcaccgtcgggaggtcctgcagcttcacctccgtgcgcttctgcaggcacgcccaccgccccttgaggcggacgaacgcctacgtgggcacgcgccggaccttgcccacc

SEQ ID NO: 39713 - DNA, 446 bp, Oryza sativa
  Clone ID: uC-osroM202019e07a1
gaatacaatctcataatgtatgtaaagcaatcacattacatgatatcaagctaaaaagtgccactacataacatgagaaacagcatttccccaaccacccaagcaccccaaatggcaatgctattttcaataattacccaaacacaaacgaagaaccaaataacccaccaggaggcatatatgtgcatccactaccaaacacagatcaattgttcgaaattatccaaatcttaacaatattattacaggcagcatctaacaattcacagttcccccatccctctgcccagaccacactccttgaccctacaccggtgttaacctacacgggtacaaactgattggcttgactgtccatctattcagaaaacaccacaaattacgtacaaacaaccgaaccgattcacgacaaatgatatagcatgcaacgaagaccatgatgatga

SEQ ID NO: 39714 - DNA, 391 bp, Oryza sativa
  Clone ID: uC-osroM202019e08a1
agggcaattaagttgctgggtaaacaagattctgaaccaaacaagatgttacttaaacattccaatgtcaagatttctgacaagcagcaaaactgcacggtaaatagatgtatgtgtatcatgctttgctagtatgaaaactgcaatacatgtctatggggaatcaacggcttcgccagcaggaatgaatgatcacaaccgagatccgttacagatcaatagctgcggccccagaatgaccatttttttgcaggctttccagaagcaaagcatgtggttccttctgggagatctggctgttcaaatggggtacacaatgtcttggcagctcccaagtcaccttttggccgagcctttacattctttttaactttcttttcattacaccatg

SEQ ID NO: 39715 - DNA, 538 bp, Oryza sativa
  Clone ID: uC-osroM202019e09a1
aagagctatatatgtgattattatctattgacaagtaacaaatacaacgttttttttttatcaaatacaacacctcgtagtttataaaagcgaaaaaaagatctgctcattagaacttcggttttatgagaaatggcatcttgtcagcaaatggagggtcagagtatctccctgtaaggatctgcgacgcgatgtggaaattcgcagcttctgtgtaatggattccatcccaattgacaaattctgtactgtccttgcaccctttggctgttacaagattaccattcagagacgctgtctgcccacaaggtactctactgtcatagttcaagggtggccctccatatccacagcatgcttggatgggattctcgaaccctgtaataatgcaaaggcagaaattaagagtgttgtttgaagggattattgttttgaaagcctactgcttaatattcttatgagctagctacaatagtcatcactgatccagcatgtgtccaaatgcatagtagaagaaagccaaagaaagaaaatggtg

SEQ ID NO: 39716 - DNA, 588 bp, Oryza sativa
  Clone ID: uC-osroM202019e10a1
agttgatggaaacgatgataaattaataagctaagtggtagaaatacaactaaatttatagttacaaatcagcgatcagcaccaaggtttcaaaacatgaggtctcccaaagccaccatcatgttatactgaactccggtcaacataggaaaagcatcacgtaagatcaaagcatgctactgacattaattaatgttctaacagtaccagcaccctctaatgcgcttgtcatagcttacagcttataaacacgtacttagatggttccagcggcgacaaatgccgctgacagttaaagttgcagaggcaacaaatgcagacgagcagctaggtactatgtcacatgataagtgctccaacgcctacatctaagataaaaatatcagaatcatcagtccctccatctccctgatactcggccaccatctggagatccacagcaaaatatgtggttggaagcaatcctagtgttacttcacctccagataattttgcaaatccagctcatagatcagatcatcatatccatagttgaaatatcaatcaccctgccaacaacaggcctttgctcatgaacgtagcacaact

SEQ ID NO: 39717 - DNA, 492 bp, Oryza sativa
  Clone ID: uC-osroM202019e10b1
ttggcaatagcttcgcgtagcttagctcggcttccccctcattcatggccattaccacgatgtgtcaccccaccccaccaccgcccgctgctccacttctcctcctcctcctcctcctctcctagtagtagcaacctacggacaccacccccacccgcttcatttatcacttgtctccccctctccctcgcctgctccgctgctcttgtgcttcgcgcctcgcctgacctcgctgtcgctgccgccagccatgaccgggatcgacctcaacaccgtcgaggaggacgaggaggaggcggcggaggaggtggcggcgaacggctcgtctccggctccggcgagggcgggcgcggtgtgcctcgagctgtggcacgcctgcgccgggcccgtggcgccgctgccgaggaaagggggcgtcgtcgtgtacctgccgcaggggcatctcgagcacctcggcgacgccccgcggcggcggcggccgcggccgccgtg

SEQ ID NO: 39718 - DNA, 526 bp, Oryza sativa
  Clone ID: uC-osroM202019e11a1
acacaaacaacgtgtaacattgatttctcgtttataatttacacttggcaatattgttctctagtcatatgtagtatggcatgttgtgatgtcctccattctgtttccccccaacttctagaaggccaggatgtgtaaaacaaatgctgctagtacaaaaactgaaaagaatggcactgctagcttttggaattcaattcgccgtataaatccctgaattccaataaccggcaatgtctacagcaaacctatgcgaagaagaaaaaacgacaaaaaaaaaaaagtcttccccagcatatgccctcttttttttgtgtgttttggtgaggagaaatgaatcatacaatttgtgcgaggtcacgaaaacgtaaccgtcaaacgtacgccttgggcgggtacttggcgacgcagtccacccaggggttgcagctcttcttccccttcggcggcggcgacacggccggcacgtcgcggagcgcgcgccagaccgcgctgttgcacttgaaccccgagccgaagccgatct

SEQ ID NO: 39719 - DNA, 97 bp, Oryza sativa
  Clone ID: uC-osroM202019e12a1
ggcaagttgactgaataatacaggtaaattttcgttcagatggccctcaaacagaaagagccatgatgacagggggagggggagggggagggggagt

SEQ ID NO: 39720 - DNA, 383 bp, Oryza sativa
  Clone ID: uC-osroM202019f01a1
ggatgaattatggtgccgggatcacatatggttccttggtattgaaagagacagtattacagatgcggttacacaacaacctgaaaaaaaaaaagaacatgacaaactgatagagcaaactgcagagctctcttgcagtttcagctgactcaaaaaaatgaaaaaaggataaaacgccgaagatatttgaacactaaaactctggctgctacaccgatatcactagaaacttcggaagtcgatttcaaccctttcatcatcttcccatcttctttttcttccatggagcaaccagtcactactgatcaaagacacattaggtaggcggcggcggcgccaacaacggccggcaatggaggtagatagcgagagagagacccccc

SEQ ID NO: 39721 - DNA, 468 bp, Oryza sativa
  Clone ID: uC-osroM202019f02a1
ggatgaattatggtgccaggatcacatatggttccttcatattgaaagagacagtattacagatgcggttacacaacaacctgaaaaaaaaaaagaacaagacaaactgatagagcaaactgcagagctctcttgcagtttcagctgactcaaaaaaatgaaaaaaggataaaacgccgaagatatctgaacactaaaactctggctgctacaccgatatcactagaaacttcgcaagtcgatttcaaccctttcatcatcttcccatcttcttcttcttccatggagcaaccagtcactactgatcaaagacacatcaggtaggcggcggcggcgccgacaacggccggcaatggaggtagatagcgagagagagacccccctctcatggtcatcatctttatcttcttcctcaggaagatgccttctcatacttgagcggcttgacaacctgccatgtgaagtcgg

SEQ ID NO: 39722 - DNA, 528 bp, Oryza sativa
  Clone ID: uC-osroM202019f02b1
taacctttacctcaagaggggcggcaaccggttcatcaagaccgcggcgtacggccatttcggccgcgaggatcccgacttcacatgggaggttgtcaagccgctcaagtatgagaaggcatcttcctgaggaagaagataaagatgatgaccatgagaggggggtctctctctcgctatctacctccattgccggccgttgtcggcgccgccgccgcctacctgatgtgtctttgatcagtagtgactggttgctccatggaagaagaagaagatgggaagatgatgaaagggttgaaatcgacttgcgaagcttctagtgatatcggtgtagcagccagagttttagtgttcagatatcttcggcgttttatccttttttcatttttttgagtcagctgaaactgcaagagagctctgcaggttgctctatcaatttgtcttgttctttttttttttcaggttgttgtgtaaccgcatctgtaatactgtctctttaatatgaaggaaccatatgtgatactggca

SEQ ID NO: 39723 - DNA, 442 bp, Oryza sativa
  Clone ID: uC-osroM202019f03a1
aacccacgacggagggggctaaacattattggtatgtagtatgttcaggggggtgcattattagcattgctcaagctgcaggtagcttcagggaagtgaaggggaggaaaaagagtagctgctccagcacaaaactactagcattacataagcacagaaaaagggatgatccttttaagacattttcccacgccaaaggtgaatggggtgaaaatcttaggcggacttcacgggggcggagttgatgatgtcgatgaattcaggcttcaatgaagcaccaccggcgagaaaaccatcaacatctggctttgctgccagctccttgcagttcgcaccagttacggaacctccatagatgatccttggtgattcagcaacctctgcactgacattagcagcgagccacttccttaggccatcatgcactttttgtgcttgaact

SEQ ID NO: 39724 - DNA, 475 bp, Oryza sativa
  Clone ID: uC-osroM202019f04a1
gatcccgatcccccccaccgccgccgccgcccgatccgaccagatccccactacgcgtcccaattccgggccaattcgaccccccgagcgaccgccatctactcacctcccgatcgattcggatccccaatctagcgggcgcggggcggggcggggaggcgggattgggctagggttttgtgggggattggtgtattggattaggtgatggcgcataagggttgcctcaagcgcctacagaaggagttccacttcgctctgcaggagccgccgccgtagaacgtggctcgcccgctgcccaacgacttatttggagcggcatttaggacttgaaggtagtgctggcacaccattcgaaggtggctattattacgggaaactcacatttccacctgtgtacccttttaagcctccatgcattagcctgacaactcctagcggaaggtttgcccctcacaaaaggatatgcccatca

SEQ ID NO: 39725 - DNA, 460 bp, Oryza sativa
  Clone ID: uC-osroM202019f04b1
acgactcaaacaaagctgttctgtagattctgtaaagagaggatatggttctacagattttaccatcaccaaagtgaagagagtccacagaagaatcgagttacgcaaaccttgggaaaactatacaaaaattaccccccggtatcacacttttatagcctctttttattttatttgtcagagttgcatcaggggcaaggccatcaccgcaccaaaaacagaaaacataaccagcatcatccagaagggcactcgcttcttctgcttctgctcgcctgcggcctccgccgcaggtttcgccttattggctactactgcagcctgttgttggaccgcaggagatggagctggggcagggttctcttgagtttctggttccgctacgggttgctccatctgtttctgttgtttgtatttctcgacgtactcttgaaacattttcctgaagtgagggcaattt

SEQ ID NO: 39726 - DNA, 536 bp, Oryza sativa
  Clone ID: uC-osroM202019f05a1
ggcagaaaaatgactatgctcttttcccacgacttgttcgacattatatggggattactagcgtctccaaaatttattgatactgggggctttccagtttccattacagacgatattgtataactctacgctctttagtacacagtttttaagcttccaagtaacttggcccgagtatcaagactgctctgttgcttgggctggtatatgagtttatctatcttgaaattgtaaaatctatcagatatggcccccatgagaccaatgatctgagggaggaccgtctatagctcgcaggagaacatcggtttggtgtctggactgagtactgaagaatgaagatccgtttggagacttcttggctttctctggttcttggttgaacttggtggtgagctttttaaagcagcatgctcctgcctgattcgcttcggttagctccggttggggctcttgaacaccaaatagccgaaaccgccaattgtcagggcaatgagtgggccgatggacatgtccatttccaggatcccgttttt

SEQ ID NO: 39727 - DNA, 548 bp, Oryza sativa
  Clone ID: uC-osroM202019f06a1
aaacaaaaaactgaagcaaaggggcaagcgccagttaatttgcatgcatatagatacaaaaaaacataatcttgatcactttaatttcacccaagcagcatagcaaacaacaccatccatccattaggaccattacacatctaatcaatcaagcatgagaggcatgcaaggacaacactgagatcttgacagctatagcatataagctcagctatgatcaaggggacactgtgcgtgtgttcttgctgcgaactacatggcattggatttaatttcattaattagctagctcggtcgatcgatcgatcgatcatcccctgcactgggtgatggcggagcagccgcgggagtaagggttggcctcggcgccgggctggcagttgtagtaggacgcgccgcgctgcgagcacggcacgctgtcgcgccgcagcgcgtcgtacccgatgtaccccgacccgccctgcagcacccgtcgttgcccgtcgccgccgccgccagctcgtactccccctcgccgtcgacgccgaggaactccatgcactccccca

SEQ ID NO: 39728 - DNA, 431 bp, Oryza sativa
  Clone ID: uC-osroM202019f06b1
cacctttcttcctcgtcgacgagatcatcggcatggcggcggcggcagtagcgttgctcgcgttcctcctcgccgcggcgtcagcggcgtcgtcggcgtcggcggcggcggcgacgctggtggagggcggcgtggtggggcgcgcggcggtggtgatgaggcggggagggaggacgtgccgtggcacggtgggggagtgcatggagttcctcggcgtcgacggcgagggggaggacgagctggcggcggcggcgacgggcaagcggcgggtgctgcagggcgggtcggtgtacatcgggtacgacgcgctgcggcgcgacagcgtgccgtgctcgcagcgcggcgcgtcctactacaactgccagcccggcgccgaggtcaacccttacttccgcggttggttcggcatcacccaatgcaggggatgatcg

SEQ ID NO: 39729 - DNA, 585 bp, Oryza sativa
  unsure (1)..(585): unsure at all n locations
  Clone ID: uC-osroM202019f07a1
aaaagcttgcagatgtagatcacggcaaatgatgacatcacatgtacatctcatctacctcacttccaaaaaacacacaagaagcttattgagcacgttgtacatctgaaaatgaaacgaaatggtaactattgcgattagcaaaccattaaacacatgtcatcgatcgatcgatcaccctgctgatggtgtcacgatgatacaggtggtccggtcccacctgcagtgactgtacaactgatagtacattggtttctttctcagtgtacatggctcttcttgcagtcagctgcttcctcctcgccgccgccgtcgcgcggcggcggcgcgacgaggtcgccgcagtcgaaccacatggtgtcggcgagcaaggggaagacgaagcggtagaagatccagtcgcggaacagcttgacggcggcggcgcgcacgccgggggcgctggtgctcccctgctggacgtagcccgacaggtacgcgccggcgacgatccacgcggcgcggccgcggcgctccgcgacgtacgccgccacgccgtcngccggcgacggcgactgcgaccgagacgacagcgcgcgggcgagc

SEQ ID NO: 39730 - DNA, 459 bp, Oryza sativa
  Clone ID: uC-osroM202019f08a1
cattggggcgtttgagtatacatatccggggaaaaaattgctttatactagtatcgtatctggggattcatgtggaatttgcctatccaaaaaatgttgtgccacactcgttaggccacagttgacaaccctccctatcacaaaagataataaaaatgacaaaggggaaaaatacatcgatgtttctttctttgcctttacagggtacaatagtttatttcactcgccacgctatataaactctgctgcctccaagttggatggcaaaaagaattgtcctctacactacctcaaaaaaatacttcatgttggcaataggggttgcctctcatcagttccaatcctatggctggcatcttcagcagcgccagcagtcatatttacaaaagaagattcagatgaccgatgattctgtgtatcttccaactctaacaattcagctggtttgtcatctttggc

SEQ ID NO: 39731 - DNA, 632 bp, Oryza sativa
  unsure (1)..(632): unsure at all n locations
  Clone ID: uC-osroM202019f09a1
ggagatgagcaccacgacgcacttgatgctcttgcacaccgtctggatcaccgtcggcccgggctccgggatcgtcaggttcaggttgtcgccgaacccctccgcgtacggcggctcgccgaccaccacgatcgcgtagtcgtacttgtcgccggtgaccacgctgctgtccgggttctccgagtacaccaccgtcgtgctgggatcaacggtggccttgatcgccgacaggatcgtcgtgccagcagtgatgttgttgccgggctgtccttgccaggtgatggtccatcctccacactgtctgcccaaatcatcagcatggcttcccgcgacgagaattttaccggctttcttcgggaggggaagcaccggagagtaggaggattttccgttcttcagcagcaccaaggacttcctgaccgcttcgcgcgcgagctcacggtgctcttgctttccaagttcatcggcgaggctagagtcagcaaaagggctctcaaatagacccatggtgaacttgactcggagaatcctgtagacagcatcgtcaattctgctcatggngatacttctgtggtaacttgctctgcaggtcatcaatgaatctgtgaagtataaggacatgatcatgtaat

SEQ ID NO: 39732 - DNA, 501 bp, Oryza sativa
  Clone ID: uC-osroM202019f10a1
atgaagttgatagagttggttatgcgacttcaaagtatgaggtgttagatggacttttactgagggtatattgacttctccctatatagtaatttagtaacaccaagcaaactacattaagagaccatggagcaacagcatcactcttgttctacacactttcactgcagcaacaccacaaattaaacctgaatacatcagagttgctactgctccctaattcagtctgttattttggtgttcgcgttacagaaaaaggctcaacttgtgtccacagaacctgcacctttctcctcaagcttatccatggctgatgccaaatagttgtcacagtaaccaggtggctcatagataaagcaagagatcacgtctcgcagtgtcacgacaccaacaacctcgaagtcaccgtccacgacgtatatccggtgggttattcttgatgcaatgctgtcaatcacgctgccaagagaagcgtcaggcgaacaggggagaggcggcttc

SEQ ID NO: 39733 - DNA, 493 bp, Oryza sativa
  Clone ID: uC-osroM202019f11a1
aattgcaaaccactgcttacggggaatatatgacacatagggcaatcatagtacatataccatgaaattaaagcaatatacatatagcacttgatcccatcagtcttaactactaatactctctcccctacatgtacacaagctaggcatgctgattgatcaagctatagctagatatatataaagcagagttgtctgacaagcaatgcataatacgtgcatcatcaggtgtaattacagtagacagatgcaaggatatgcagtgcaaatatagatttcgcagttcgttcatcagatgatgagagtcgtcgtcgatcgatcgtcagctaattaagctaagagcagcaattgaattaaggcgttgcttgtttgcaatttgagtagtactattgcgaggcatcgagcatcttcttgtagtactcctcgtcgtcgatcctccacagcgagtagtcggtgcagaattcccagaccggcgacggcggcgaggccatcg

SEQ ID NO: 39734 - DNA, 483 bp, Oryza sativa
  Clone ID: uC-osroM202019f11b1
tttgaagaaggcggcgacaatggcggacgcggaagcggaggaggagatgatgatgaggatgatgtgtggttcaggaggcaacgagatgacgaatacgaatatgaataataagaatagagaaggggaagaagaagaagaagtaagcggaggaggtaggatgaggaaggggccatggacggagcacgaggacgtccaactggtatggttcgtgcacttgttcggggaacgtcaactagatttcttagcaaaggtctcagatttgcgcggtggcggttgacctatctacatgcactgcatgccatcctctctttgtatatatatctccttgccactaaacattcatgcatccatcgaatggttctttatatttctttttttttctcttcttgaatgctcttgaacttgaccccctttctctctctcttatcatgcaacacccacacctgcatatatccatccatacatctaatcccttatcacatt

SEQ ID NO: 39735 - DNA, 506 bp, Oryza sativa
  Clone ID: uC-osroM202019f12a1
acagtagcctgaacttggctgatgctgtaatgtaatgggatttaatttacatttttactccacaaagttcggtacagtgcactggtcaccggccttcgacgatggtgacggtgacgtcgttgacggtgcaggtggacgaccactcgccgtcggtcgagccgccgccgccgccgcggtcgctgcagaagcccgggtgcctcggctgcggcaccaccgcgctgaggttgcccagcatcatgaacaccgccgccatgtgcggccggtcctccggccgctcctgcacgcacaggagccccacctgcacgcaccgcagcacctccgacctgctgtaccccccgccgccgccgccgccggccaccgcctcgtcgagcagcgccagcgcgttgccctgccttcacagcctacacgcgtggctgagcaggctcgtctgctcgccgctgctgtacatcccgcggttcttccggcccgtgacgagctccagcaccagcacgccgaagcttgacacg

SEQ ID NO: 39736 - DNA, 403 bp, Oryza sativa
  Clone ID: uC-osroM202019g01a1
ttttaatggaataactttggcatcaggctgggatattatcaatatgtaagagaaaaggaaatatcattcttttcttgtacaggaaaaggaataaagggaacctcacagctgttccttttttgtacacttgagttacagctgaatcactatgaagaccaaagaaaagagagagagaaataataactggaaagggaattgctagtctataactctgatgatgagaggaaactagctagttcttcttcaacctgatgttgagaagagctgactacctagagtcacagttggtgtgctttctggcatgattgtggccatcctcatctcttgctcgcgaattcggtttatctccgcctccaccaagttcatcgatgggcgatgctcgctcgtcgggttcacgcaccac

SEQ ID NO: 39737 - DNA, 418 bp, Oryza sativa
  Clone ID: uC-osroM202019g01b1
tttagttttcctctctctccccaactctctgctcctcactctcggacaattgacagtacagaggtagacccacctgaagaacatgaggaggagaggaggtcttttgctgctttcttgcctccttctttctccttttttgttcatggattcttgatagcttctgcatgtcaagaaatgtttgtgcctcaatttgcctggttctttcttttcttgattgattagatttgattttgattcctttctttgtagttctcctgaaccaagtaggtgttgcttctgcttcctttgatatgattggagcaagtggttgtgaaagaggaagagattgacgagagagagagagagagattaagaaggcgaattcaagaactgattagaaacaagttggttgtctgcatcatggattctgcatttgatg

SEQ ID NO: 39738 - DNA, 437 bp, Oryza sativa
  Clone ID: uC-osroM202019g02a1
tggagggggtgtcgtcgttcgaccacatcatcgaccagtcgggggggctggaggtgcgcatctaccgggcggcggcggagggtgacgcggaggagggggcggcggcggtgacgcggcccatccttgagttcctgacggacgcgccagcggcggagccgttcccggtgatcatattcttccacggcggcagcttcgtgcactcgtcggccagctcgaccatctacgacagtctgtgccgccggttcgtgaagctgagcaagggcgtcgtggtgtccgtcaactaccggcgcgcgccggagcaccgctacccgtgcgcgtacgacgacgggtggaccgcgctcaagtgggtcatgtcgcagccgttcatgcgcagcggcggcgacgcgcaggcccgcgtgttcctctccggcgacagctccggcggcaacatcgcccac

SEQ ID NO: 39739 - DNA, 493 bp, Oryza sativa
  Clone ID: uC-osroM202019g02b1
gcctcctcaaatctccttgttgatcgatcactgtacacataacgttagatagcaactttcctctctttggagtacatggagaagatggatggaatgcgagattaaaagaaaaaaaaaacatgcttcttctctccatcaaccaaagtcacaacagtagtagtactaatggaggcatgcatgacagacatggaactaccctcaacttgtcttgactacactgaccccaggcaaaacatggaaaacatggatcaaagaacgatccaaaccacaaaaaaagaaaaggatgaacgatgattagtggaacaaggaccacgacgacggacgactttcttcttcttccttgacgcaaccgagtcaccatttgattagagctgatcagacagcatggagctagcttctccttcgccacacaagagcagacgacggcattgcgatcccaacagcagcagtagtataggaggtagtagtagtagtagtagtaggtactataaca

SEQ ID NO: 39740 - DNA, 395 bp, Oryza sativa
  Clone ID: uC-osroM202019g03a1
aacctcgtacaactgcatgtggggctttatttattcatacatacatacatacccaatacagagcagtataaccgtacgcaatacacggcacgatcgaactcgtcgaagcagacacgaaatcaagtaagcgagacacgtacgtacgtccatatatagacggggtctatggcaggtgggccatgcgacaggcgcactcacacacgtataaacggcacgcagaactggagtattatggtttggttttagcaggaggggacggggacgtggcaggcggccaagaccttcttgccgttgggggagttgacgtagcgctgcaggtttgggtcgtgcgcgtactggcacaggcacggctgctgctccttcatccggctgcagcacgacgccgacggcgacgc

SEQ ID NO: 39741 - DNA, 153 bp, Oryza sativa
  Clone ID: uC-osroM202019g03b1
tttggtttctgatcatttttatctaagttcttaatttcgatcgcgaagggccatggcgaaggtggcgttgcctgtggcagccattgcggtgctgctgctgcttcgcggcggcggccgcgccgggggcggaggcggcgtggattatttgtcttg

SEQ ID NO: 39742 - DNA, 550 bp, Oryza sativa
  Clone ID: uC-osroM202019g04a1
caccacaaccgaacacgtatatggggtgattgacaagtgatgagaaatatatgcattgtcatactagctgatgaacccaaaatcccaatgcatctaataactcataaaggaaacatacacctgacccaatcggaagaacacacggcgtaccaaacaaaaacatccgtgctaaccaaaacaaataatacaccacgatgccgtcccttgctttaagagggaagggaaacaaacaaaacaaagacccaaactgtggaaattataagagttctagttaagatgccgtgaggcatgtccgcatgatgacacgccaggctaccccatggccgtatacccaagccccaagttcttcgctattcattcaaccatttacctctcaattttgtttggaacaaccacaggtattattcggacagctaatttcttcaatcaagccgacgatgagctgctgacccccagttcgcggtgagccatttgcagacttcatccatctcctccggaacagtgtaatgtccaagtctgttgtaggacttgaacaccacatttgaaaatc

SEQ ID NO: 39743 - DNA, 500 bp, Oryza sativa
  Clone ID: uC-osroM202019g05a1
cttaggaatatggaggagggcctggataggatcagtctgattgaactaccttccaaaagaattagtttagtttggggggcaagtgtgttaaatattaccccagaatatgaacactacgtgctagagattaccaagttgtgatttatggaacaagagccaaaggctgcagatcaccaagtccttctcatcttgattactaagctcattttcttggttgctccttttcatcttgttccaaatccagcagattaatttgatgagctttaaatcttcagcaacagccatattccctttccggtctgaagggtgaaaattcagtgcataagcagtcagcaattaatagtacagcacaaacccaagatcatgcagatgatgcattggatatcttatgcccaataagacggatcaacatcaaatgctccaaaaagcctttagcaagtttgactagattctgccctgatactggaagtgtaatttgtagtcctgcaccagatttgcaa

SEQ ID NO: 39744 - DNA, 492 bp, Oryza sativa
  Clone ID: uC-osroM202019g06a1
agcggggaaaaccatctttatttatggcttatcacgagaagaaaacagcaggagcgtgcaccaatcggacaccacatacacactcctttttttgggggacacgatgaatatgaaacgagcatttgaaagcaacaaaagctaatcggactcgcgaggcgaggatcatggaggtggagcagctagcatgcctgtcgatcactccgggggcttcatctcctgcttgatggcagcgaccaggtggtcgtaggcttcgctccacgcgctcttcatcgccgggctccacatgtccgccggaacctcctccttgatcgtgtcaagcagcgcgaacttcaccacctcgaagtgggcgtctccgacgccgtacttgaggtgcgtggcgccgagcctcttgagggtggtgtctctcacggtgaccttcccggctttccgcagctgcgcggcggcctcgcatgtcatgacgaagacggacatggcgtgggtcttgagcttggg

SEQ ID NO: 39745 - DNA, 519 bp, Oryza sativa
  Clone ID: uC-osroM202019g06b1
tgttttctgagcccagctagctctcgatcatttgttacagagaaattgatcaaagcaggaaattaaccagctgtcaggaagcaatggctctcgtggaggataacaatgccgtagcggtgagcttcagcgaggagcaggaggcgctggtgctcaagtcatgggcgatcttgaagaaggattccgccaatattgccctccgcttcttcttgaagatcttcgaggtcgcgccgtcggcgagccagatgttctcgttcctgcgcaactccgacgtgccgctcgagaagaaccccaagctcaagacccacgccatgtccgtcttcgtcatgacatgcgaggccgccgcgcagctgcggaaagccgggaaggtcaccgtgagagacaccaccctcaagaggctcggcgccacgcacctcaagtacggcgtcggagacgcccacttcgaggtggtgaagttcgcgctgcttgacacgatcaggaggaggttccggcggacatgtggagcccggcgatgaagagcgc

SEQ ID NO: 39746 - DNA, 452 bp, Oryza sativa
  Clone ID: uC-osroM202019g07a1
ggttcaactatcttgtaatggttaactctgaatatgaagcagaaaattgagcagaactagagccctactgctcatataactctgaatctgaagcagctcaacgagatttttatttgagaaatcactggagcggagagcttccccacctgaatttagcaagatggatttgagcctcttcacttagactcatggtttttacattttctctattcaggtaagaactcttgggtatcctttttaactcttgacttaaacagtcaaagcgagctgaacttgagtcatgctggtgcttttcacctccataatgattattgataaatctagctctggaacctgaatgacttaagcatctagatatcttcctactcgttgtcgctcactggtgtagagctcatggaccgattcaactgtatcggcaactgcctcgccgaccctggaactttataatcctg

SEQ ID NO: 39747 - DNA, 517 bp, Oryza sativa
  Clone ID: uC-osroM202019g09a1
agaaatatggaggatggcctggataggatcagtctgattgaactaccttccaaaagaattagtttagtttggggggcaagtgtgttaaatattaccccagaatatgaacactacgtgctagagattaccaagttgtgatttatggaacaagagccaaaggctgcagatcaccaagtccttctcatcttgattactaagctcattttcttgtttgctccttttcatcttgttccaaatccagcagattaatttgatgagctttaaatcttcagcaacagccatattccctttccgttctgaagggtgaaaattcagtgcataagcagtcagcaattaatagtacagcacaaacccaagatcatgcagatgatgcattggatatcttatgcagaataagacggatcaacatcaaatgctccaaaaagcctttagcaagtttgactagattttgccctgatactggaagtgtaatttgtagtcctgcaccagatttgcaaaagttggtcggcatggaccc

SEQ ID NO: 39748 - DNA, 410 bp, Oryza sativa
  Clone ID: uC-osroM202019g10a1
cgatcaaagtatactgtattattgatgtgtttcaagaagtggatgtacaagcaaagaaaaaagagaaaaaaaaataaaactagaataaagctactaagaagaattactctgtctttacacttttgagatcgatctcaatttttcgtcgtcatcagcatcgaatccgtcctccgattctcccgtccacaaacccaatcgaaatccatccccaacaaaccgagagatcggaggacgaagcaaaaggaaaccaaaaaactagctaaactaagtaattaatcgaccaaccaaccctgaagaagaagaagaagagcaatctgggagctccgctccaccgccatggcgatgcatccatggagatgacggaaggatcaggcgcggaagcaaccggcgaagcggtggaggggaggtgg

SEQ ID NO: 39749 - DNA, 538 bp, Oryza sativa
  Clone ID: uC-osroM202019g11a1
ctgaaacaaatttctttattccagggatcagacatataagttatgatccatagttcacaatcaaacagtacatatataacaaagagcaattaaaacatattgttttacaaaaacaaacaaatgtgctatagcacggtaacatcacatgcccttcgttctgatgacgattgccagcaatatacacaatagacattttcttttgacgtgaatgtacacaatagacatcaaaccacaccattatttattttccgagtagttccaccatttcttgtacttggactgctgcatgatgcattattcggcctgctggcctattgtattcgttgtagtcattacatcagcttgtgtttgtggagtactatagaatgcatgaatgtcaagctgtctagttgtctcaatgccaggattgttcttgactatgttgtgctgaatagtgccatatgccatagcaagttgtccagtcccaccgacaatggcccactcaccagtttctggagtagtccccatcacctgaagctttgatccattaaacctggca

SEQ ID NO: 39750 - DNA, 534 bp, Oryza sativa
  Clone ID: uC-osroM202019g12a1
gccaccgaagacatgaaaaaatggtaccctcaaacctttggggtagtcatgtttacatacttacaagttattacagtatgaactttgatttacatggacgtgtataaacctgagcaggtaactttacaacatgatcatgttttgttgtattttacaagtaacacaatctctaaagtaattttgttctacaagcacaacaaagcaaacctacaactaccagcaacaacagcagggggtgatcttgtaatcattgggaagtctgagcactagtttgcgtttcagctgtttctcctgaagcaccatttccatggccattttcagttgtcggatgaccatcaataggtttaccctcaactggaacaggcccttttttcaccaactcagatgcttgagcttcagtctgctctgggatatcagacagcttggcctctggtttcttcctggaaatctttctactcagtatgcttgtcagtgatctacctggctcacctgcgtttttttcatcaccttggctacattttctgtcaagttttt

SEQ ID NO: 39751 - DNA, 124 bp, Oryza sativa
  Clone ID: uC-osroM202019h01a1
gtattgtaaagctttgatgcataagtggggtttcgacaatgacaaatgatactaagcggatgtatacatataaaagtggccttttattctgcacagattcagaattggggggggggggggaggg

SEQ ID NO: 39752 - DNA, 169 bp, Oryza sativa
  unsure (1)..(169): unsure at all n locations
  Clone ID: uC-osroM202019h02a1
gtattgtaaagctttgatgcatagggggggtttcgacaatgacagggggtactaagcggatgtatacatataaaagtggccttttattctgcacagattcagaattgggggggggggggggggtccancgaaattagaacctatgaaccccaggcacgcgggaggaggc

SEQ ID NO: 39753 - DNA, 535 bp, Oryza sativa
  Clone ID: uC-osroM202019h02b1
tcacgctcacgctccactacaacgcactgtacacagttgattattagctagttgggtttctggcccggccgccggcgagatgggcaaggacaagcaccaccgcgactggatcctccggcggtgctgcggctccatcgccgcctgcatcctcacgctcgccgtcctcgtcggcttcatcgtgctcgtcatctacctcgcgattcacccctccaagccttctttctacctccaggacgtccagctccgcaacatcgacctctccgaccctgccatctccctcaacctccaggtgacgatcgcgtcgaggaacccgaacgacagggtgggggtgtactacaagacgctgcacgtgttcacgacgtacagggaggagccgatcacggtgccggtggagctgccggcgatctaccaggggcacaaggacgtgtcggtgtggtcgccggtgatgtccggcgagtctgtgcccgtggtgcagtacgtggcagacgccatgaggcatgacatcgcagcgggctacgtgctgctgcacgtcaag

SEQ ID NO: 39754 - DNA, 390 bp, Oryza sativa
  Clone ID: uC-osroM202019h03a1
gaatcatcctacaacggataaacgggggtattccattataagggtgggcatctataataacaacacgccatcaagaacatggcttctaaaatggtcatctacgtcgagaccggctggggttcatcagcatcatcatcatctatgaaccccaggaacaagggaggaggcaaaattaacacaagtgccgatagcttcaagaacttcccccagaatgggggcaatatatggatttgaacacgtacaaaaaagaaaggaacaagaagaatgaataaataatatgtcattagctagctcttcatctcgccttcctcgaggtcggacgaggggaggccgctcaccctggccttgaggggaacgtcctcggagtcgtccagcatgtcgctcttgttc

SEQ ID NO: 39755 - DNA, 488 bp, Oryza sativa
  Clone ID: uC-osroM202019h04a1
aggttcaaatccaacttattcagagggcatactgctgtcccacaggaaactgtttcataaaactaacatatcatacggactcgatggtccattaaaccagacacaagtagacatcagcaccacaaatacttgacgaacagaggctcgggacgaccaggcacatcggcagctccaccaaactggctgattactgaccaccacggaggcggagcaccaggtggagggtggactccttctggatgttgtagtcggcgagggtgcgtccatcctccagctgcttgccagcgaagatcagacgctgctggtctgggggaatcccctccttgtcctggatcttggccttcacattatcaatggtgtcggagctctcaacctccaaagtgatggtcttcccagtcaaggtcttcacgaagatctgcataccaccacggagacgaagcaccaggtggagggtagactccttctggatgttgtagtcggcgagggtg

SEQ ID NO: 39756 - DNA, 551 bp, Oryza sativa
  unsure (1)..(551): unsure at all n locations
  Clone ID: uC-osroM202019h05a1
gcaaagaccagccagagtaacacgggggggcaatttaacatcgctggaaagaacatggcgaccattcattttaacattgccaggattatggaaattctgtaacatttcaatgtaagcaccgtgctcccaaaaacatatcccttccccaacattttccaacgaatacaaccagttttgcatcacaactcgcccttctccaaaaactaatgaacaccacccctatagccttcccatggtaaacacaactctgtacatcgtcgatgcattcggatcagcttcaaaataaattcagcaatgcttatgaatctctgaaattttctctatcctctagatggcaaacgatcgaatggccaccctcccactcctatgccaaaatcttattgacaggatcagggatcagaactataccgaagctccaaaaaacctaaacaaaaggattactggcttttctatttctagtattctcatgtgaccgtttatttatgacggngcatgacaaaactaactgatcagtgcaactggctgattaccactttacgcctttatccccc

SEQ ID NO: 39757 - DNA, 457 bp, Oryza sativa
  Clone ID: uC-osroM202019h06a1
ggcggcggagggggaggcgaccacgttccgggcgatatcgggggcggcgctcagtgccaacggatccacgccgctgtccacgtccgtgctgctgctgatgccggaggagtcgtcggcgtccgccaccgcgtcgtcggggtttgagagctcggagtcgttcgctgctgtgccgctgcagccggtgccgaggttctcgtccgggccgatctccgcgcccttctccggcgggttcatgtcggggcccttggagagggggttccaatctgggccactcgacgccgcgctcctctcgggccctctccctggcaccggcacctccggtcgtatgggtggcgccgtccctgcgctccgccggagcctctcccacggtggccgacgcctgcgcaatttcacccgcgcgctcctcgcgcgcaccgagaagtttcaggattctgcggatctaggctcgccggacgcc

SEQ ID NO: 39758 - DNA, 401 bp, Oryza sativa
  Clone ID: uC-osroM202019h06b1
caaagaaagttgaccaattggtcgattttataaattattaataattgaacaaatcctcatttacatcaacatattataccacgcggccagccctgcgggcgattcatggcgattcagctggatgtgccgagagcccaagccgaatccaaccccccacagtgcttggttgatattgtacagtagcaactgggggaagaggagtagagtagccgcaagaacacctctcagctcaaggaaggcatgggaagaaccccctctatacgttttgtttcactagcctactattgtttctatttacacgcaggatctccaaatcctgccctccaaagagatgacgatgacagatacatcgtcatggtatcgccgacgatcaccatgtggtatctcgatcagttcatgaa

SEQ ID NO: 39759 - DNA, 291 bp, Oryza sativa
  Clone ID: uC-osroM202019h07a1
aaaaagtatactgggggggcctaaacttgccaccgagatacagaaacgtccttgaaccgcaataccagacacccggggtcccccaactatacaaaaccggtcatccaacgtccctcggtgattttgaccccggttttgatctacgtggcggctgagttagtgtgggacccacgtggccccacatatcaggtgtccacatcatctttatttcccctcttctctgtcccttcctcccctatcagctctatctctcgcaggccaggcctacgggttagggagcagacggctggg

SEQ ID NO: 39760 - DNA, 303 bp, Oryza sativa
  Clone ID: uC-osroM202019h08a1
ctgggggggaagcaacatcacttcggggcaggattcattgtactcatgagtgaacagggcgaaaaaaaatatcacaatatcacgtccagtttgcgcgatgtatctcaagcaaaaggagccaatgcaaccaagtcatgcattacaacccaactagacaggcctacgagcttaggtgtgttttcgtatgacaaaacttattacaacgcgcaaggtcctagtatcccggtctcttccaaaaaactactagctgctatctctaaaagcagggcaactgttagcacatgcggtttcacttcttgacct

SEQ ID NO: 39761 - DNA, 440 bp, Oryza sativa
  Clone ID: uC-osroM202019h09a1
gcgagacaaatacacacccaggcggtttgttcttagattctttttccctcaaccacctcacatcaccattattgttacactattccttttccaccacttatcctcccgtttgcaattaaaaagaataaaaagggaaaaacatttgcgagaagagaacagcataataataacatccacaccttcaattcccaatttttttctccatttcttgctaaaacagtagattttttttttaattttgtttgcctctcagaacctaacgatcttggccgcgcgcaccaccgggttgaccctggcgatggcgtccctcgccgccgacttgtagtcgtagctgcagccgtggcggtcggagtaccggtgctcgccgcagaacaggtggccgcaccggcaccggaacccggtgaggccgacacgcttacggcacctggagcaccggttca

SEQ ID NO: 39762 - DNA, 493 bp, Oryza sativa
  Clone ID: uC-osroM202019h10a1
gccatgccaatacgggggtcagacttaattccagggggctactacattcataccagccttcctgtgctcattattctttttctaagcacaaaaatgttcaatcagccccgaacaggacaggctaacaatggataataatatgtatgtagtggctacatttcttcaggattcagtttccacgacgatgggaaatttcatttagttaccattgatctgatgaaaagccttgcttccaagaaccaactccttgaagcgaactatgcagcccattgcacgctcgaattcgctgctctccagagcaaagctgaaccgacagtgatccggtattcctgtccatgagctgctgtttatgcacaacccggtggacctgagaatggcttccttgatgttgcagccatctagcttgccatcaaaaccatccaccttgattattttgccgatgtaggcagtcggtttcgccagcatcgatatgccaccatgactgccagcaaca

SEQ ID NO: 39763 - DNA, 420 bp, Oryza sativa
  Clone ID: uC-osroM202019h11a1
gagtgaagcaaactctgggggattcatcattcataggggggaccatgacatgccacccgcgaccgagaatatacattgccgagaggcgagagcccaaagatggacataaaaatttaaaaagaagaggtgaaaattaagtaaaaacaccgcagaaaaatagattggcgcgcttccacgctagctgcaaatatcgctctaataatctgcatgcttcggacggagaagcacatcggatatagagaggaggaagaagaggaggaagagatgagcggcggcggcaaacggcgaggaggccggcggcgagggcaggcgcacggcgacgagacgacggcgtacggagcgccatcatcaggcggcagcgtcgtcccaggtggcggcccagttggtggcgctgccgacgcggggcatggagttgatctt

SEQ ID NO: 39764 - DNA, 403 bp, Oryza sativa
  Clone ID: uC-osroM202019h12a1
aagagcttgaagggatagatgaaagtatggttatactatttttggagccaaaataaaaaccttaatgataccaacacaaaatacaatggaattggggaataaaaatatgcggcaactttaaaacagccatttactcctggggacaaacagccatttacatttggagtatgtagcaagagacgagtttgatcacgagtttactttggctgtacagcacagataagtgacacctggggagcaatgccatcgggtgaacacagaagtcagcagctgacttcatttagatgttaacattttaggggtaataaaataaagagctcattttgattcctgcatcctgaagtttttgcccatgttctatcgccactggcccttggtgggacaaatgaaaacaatggaaggt

SEQ ID NO: 39765 - DNA, 487 bp, Oryza sativa
  Clone ID: uC-osroM202019h12b1
tgtttccccacccccgatccgccgctcccctcgccctcctccgcgccgcgaccgatctccacctcgacggccgcctgcgcgccgccaccgagtcctccgcggctgccaccacctcctgaatccggcctcccaccaccccatcgcacggtggcctccgtcgtcgacagtttgtctcctttctccccttcatcaccgagggacatctccatctaggaaaaaaagacactgcactatggcgtctagacgcaatgttcgggggtatgctccccttcctacagaggacagggatgacagcaatcttactgatgatgttgaccttcggttcacttacaccccaaaatccctcaggaaattcccgtggaagtcaattgccctggcactattcctcctcctctagggatgttcgcttctcttcctgtcatattttatattcacaggtcacatggagggggataactctcagcatatggtctctggttcctgggca

SEQ ID NO: 39766 - DNA, 421 bp, Oryza sativa
  Clone ID: uC-osroM202020a01a1
tttgttttttttaagagccggggacaagtgcatgatatttcccaaggtgttaatctttggcatagaattgccgaagtcagtagtcggactgaaattttactgcctgtctacatcttacagttcctgttcctctaacataagtcagtagtgaaactatgcgtaaggccatccggttcaattcatccaaaaacagcatgtccttgtcttcaaaacctaagacagctttcccaaaaccatgcccattaaagtaggtttgcactctttcaatctggctccatcttttaaagcttaaatcttgctctattttttcttgccactttcgacaccactacaaccttctactcctttgcggccagggtgatggaaaaataaagaaaggaatgggtccacttctttggttgtgtcaatatgcaaatgtggc

SEQ ID NO: 39767 - DNA, 331 bp, Oryza sativa
  Clone ID: uC-osroM202020a01b1
atggtacctaaaatgaacggttttgtggttgggggtgattttgtaacccgattacaagttgatggaccttcggtgtacttttcctaggctaactaactaggcttgtgtagggacaaggctttggcccaaaaaaaaaaggaataagttcaccggaggtccctcaacttaacagcgagattattttgagatccctcaactataaaactagaaatgttcacccctaaactcactcaaaccgttcactggaggtcccataaatgttaaaaaaaaaaaaaatatagttacaaaattattttaaattaaataaaaaaaaaaaatgttcatttatttg

SEQ ID NO: 39768 - DNA, 488 bp, Oryza sativa
  Clone ID: uC-osroM202020a02a1
tttgtgtttttaaaatttttgggggttttttctgggctgtaatattcatgatgctcttcatttcatcatatatactcttgtacatagataatcagaagccatatacaattacacgggaggcactcaaatccatccacctttctgtgcacccacccagggaagcctatgcaaccaccattttccaaaaaggcaccagagaagcacaatggcccaaacacagccaaccactcttaaatccccttttcatgagccaccaccacccaacacaaagctgcctcccaaaaaaaccaaaggacgcgtcgcgccttcactgtaaaggttgtgcacaccaacagtgtacaggagagctcccataataactaaaagataatgctccctctctaattaaacccccctcccattaattacactattttatatactactaatacccttgatgatggtcctaatgataataataatctttctcccatcctaacccaaaaccc

SEQ ID NO: 39769 - DNA, 278 bp, Oryza sativa
  Clone ID: uC-osroM202020a02b1
ttcttgttctcgactccgatcactctcctcctggggttcgttacggactcctcgcttcgctagctcgcttgcttgctggctgagctgtggtacgctcgccatggcgtcctcgacgggggggttggaccacgggttcacgttcacgccgccgccgttcatcacgtcgttcaccgagctgctgtcggggggcggtggggacctgctcggcgcctgcggtgaggagcgctcgccgagggggtttctccaaaggcggaacgagggtgggcggctgagtgccc

SEQ ID NO: 39770 - DNA, 454 bp, Oryza sativa
  Clone ID: uC-osroM202020a03a1
tcgacggccttgggggggtcggagccggggggaccgccgccgcgccgtcgccgaacagcgcctgcccgaccatggagtcgaggtgggactcggagggcccccggaacgtcaccgccgtgatctcggagcacacggcgaggacgctcgcgccggggttgttctcggcgaggtccttggcgacgcggagcaccgtgccgtcggcgaagcacccctgctggtacatcatgaggcggttcacgttgggcctcagggcgagcatcttggccagctggtagtcggcgcctggcatgtcaacgccggatgtggtgcaaaagacgaggtgggcgatgcgggagcgcggctgcccccactccttgatcgccttctgcgccggcgtcttccctagcttggggacctcgacgacgaccatgtcctgccgcgcgtccagcgactgtgccatgtacgcgcacatgtt

SEQ ID NO: 39771 - DNA, 377 bp, Oryza sativa
  Clone ID: uC-osroM202020a03b1
tttactttgtaaatctagcttgctgtaaacacagttagttcgtaattatcgcatagggccatggggaagtacagtgtgggtctcgtggttttagggttgctggcccttgcgttttcgaccactgtgctggctgaaacacatgttgttggtgactccaacgggtgggacttctctgtgtcgtttgatagctgggctgatggaaaggtcttcgctgctggtgacactcttgttttcaactacaaaccgggcgcacacaacgtgctggccgtggacgcggcgacgtacaggagctgcaaggtgggcagctctgcggactcggtggcggcggcgacagggaccgcgtcgttcctccttaagaagggcgtcaactactacat

SEQ ID NO: 39772 - DNA, 431 bp, Oryza sativa
  Clone ID: uC-osroM202020a04a1
ttgggttttttaaatttttggggcacttcacactttttaaggtaacccggagacggcacacctgaaatgccctaaattaaattggagctaacaatgtaatttacatttgaactttttggtttacagctacaacaacatgcaaaggcacaagctgcagcaatcacatacaatgtctgtagacttgatacatgttcagttaacccccgtttacaaaatcaatatgtgcatcgcccgccctacagtaaggttcacaattgggtcccaaggtaccaaatttttccacccccatgaccaaacctttgggactacaaattaaatggagaaaaaagatgcccttttccccagggttccaaatccaaaatgagcaattggagagcattaatttggccacttgattaataaccacacgggaaaaataatttctgccccct

SEQ ID NO: 39773 - DNA, 478 bp, Oryza sativa
  Clone ID: uC-osroM202020a05a1
tttttgttttttcgaaatgtttgcggattaattaactgttcacaatacaaatacagttggcacaaaatgtgtcctgcccaaaagcgggaaggcaggaagggaaaaatttgcaggaactaacgtgtggaatcaaagaatcgttgctgcatcctaccgatgataggctgtgttaagaaccaccccgcctcctctccatgcatgtgcgcgttcgtgcgtgcgtacgtacgtgttgtttgatttcagaggatcagaagtcgaagatcatcttgcggaacttctccatgtgctcggcctgcagcgagatggccaccgacaggctgccgtcgccgctggcgctggggagcacgaaggcgagcccctcgtacgcgatgccgccggggcccatgaacaccggtcgtccctagccgaagtcggcgtcgtggatcggcagtcggacccagctggtgaggcccaggttggggcaccggaacgtgtgcgc

SEQ ID NO: 39774 - DNA, 376 bp, Oryza sativa
  Clone ID: uC-osroM202020a05b1
ttgtttttttttttttttttttttttttttttttttttttttttttttaagaaaatcttcttttgtttgagttaacaatagaatctttttttaatcacaatttgccccccaaaacaacccccaaaaaatttccacatgatgaaatttgggcgggtaatattactaattctacatgtataaacccgctgcggatgaaattatttttttcctttaatataagcttaattattgattgacaactagtagggggtgttgaccatgaagcacttttttttgatctctccctcggcacccgggagcacgttgatgttgcccatttttaccatggggggggcgaacttgacctggaacaccttttcgacgggggagtggagct

SEQ ID NO: 39775 - DNA, 312 bp, Oryza sativa
  Clone ID: uC-osroM202020a06a1
ctgtctttgggggaaatgtaccatctgggtccgaatttcattcgggatatgaccgttcatggcacaccacatttttcatgagcaactcagaatgacgagaccaccgtattgtcgatatgtacaatccaattttgacaacaacaattaaattaccgttcataaataatcatctaaggttatgctaaaagactgctcgtccaggtgaagcggccgctgcttaggcatagtgaggctgaattccctctcggcctcaggccgagcatcttgtccagatggtagtcggcgccgggcatgtcgaccccggaagtggtg

SEQ ID NO: 39776 - DNA, 420 bp, Oryza sativa
  Clone ID: uC-osroM202020a07a1
tgtgttttttaattttttgggtttttttttttttttttttttttttttttttttttttaggtaaaacactggtggtaccaagaaaaagtttatccccctggagtactggccatcaaaaatttaccacttaacttaccccctcacccatgcattcaaaaccatgcatgcaggaaacaattaccacaacacacacaggaaggttgaattttatcacaaccatctttttttttttcccccccccaatttattaacattttaaacatgcataccccacaaaaaaaaaaagaagaaacaagaagagaacattttccatcgcccaaaaataggtttcaccaccctgaactcattaaggtccttgagatgccctggccctgaagaaaatgatcacacccttaacctgacaacttttggaaaatgggg

SEQ ID NO: 39777 - DNA, 368 bp, Oryza sativa
  Clone ID: uC-osroM202020a08a1
gtggggtttttaattccttgggcggttccttcttcttttttttaaaaaaaaaacgtatggagaaaggccctcatatatcaactgcacccgttggttgtgcacttttcgctaatccttggcctcaccataagcttttatcgaatcgcccttgaccagctcattcattagccccttttttagccccaccacattggcaaaaaccacattaccaacatggttcacgatcgcatccagggccaaaaactcagaagctagcttggctactgggagggctacgccttagacccacttggcggcaacgctcactctagtaatggcggcgctccttgaggaggggcttggtctgtgcggaggggtcctctaagagg

SEQ ID NO: 39778 - DNA, 424 bp, Oryza sativa
  Clone ID: uC-osroM202020a09a1
tggttttaaaagagaattggggtgtccatttatttattctgaaatattggactgacactgtgccacatgcatatatatcggtttcagcccggttacaagtttatgacacaccatacttcgactcgatactagtacgttgtaagtacgtacttgtacgacgacacgtacagggagtgagtggcaaagcactcttattttaccgccagccagtcgccgccggcgaagctactagctgttcactgcgccgccgtcaacccgctgttgaacggcctctggtcgtagcagtcgaggttgctcccgtagccgatgccgagcacgtcgcagtagcgctggtagaagccgatccggttcgccacccggtcgtcggggccgaacccgcactccaacccgccgttgatgatgttggtgatcacgccggaccccg

SEQ ID NO: 39779 - DNA, 359 bp, Oryza sativa
  Clone ID: uC-osroM202020a09b1
ttgttttgggctagcgggttgagatggcggcgccggatgtctagtaccgctgcttcgtcggcggcctcgcctgggccaccgacgaccgctccctcgaggccgccttctccacctacggcgagatcctcgactccaagatcatcaacgacagggagacggggaggtcacgtgggtttgggttcgacaccttctcctccgagcagtcgatgcgcgacgccatcgagggcatgaacggcaaggagctcgacggccgcaacatcaccgtcaatgaggcccagtcccgccgctccggcggcggaggcgggggctacggcggcggcggtggcggctacggcggcggtcgtggaggcggcggctac

SEQ ID NO: 39780 - DNA, 444 bp, Oryza sativa
  Clone ID: uC-osroM202020a10a1
tgggtttttccaccaaaggggagctcagcgcttttatagtttttgtcaactagttcccctacacttgtatttaagtatactgatcggataaagcagcgtttgaaatgatgtatctatttttcattccagaagccgcttggtgtatacaaaatggcaaaatatacagcgtcacctcttcatcaggacaccaccgtcataaccatgcgtgctgctaactcatgcgtgggaacatactttctcttgtctagaactgccgcagcacaaacggtcgtcatcaacataagtagtattcagccccatcatccatgaacctactgatatgtcatcatgggcatagctctgtagcgatgcactgtttatgttaatgtagcgtgccaaattgttagagaggataaacaaagcaccggaagcatggcgaaaatacgtttttgaatctccaaactt

SEQ ID NO: 39781 - DNA, 497 bp, Oryza sativa
  Clone ID: uC-osroM202020a11a1
gcaccggcaggggctgagaaggaagtggggcccccttccctgacctcctcatcggagccccctcccctcttcgatggaaccaccaggttgtacgttgcgtaccactgcccttacgcgcagcgcgcgtggattgccaggaactacaagggtttgcaggataagatcaagattgtcgcgattgatcttgcagacaggcctgcttggtacaaggagaaggtttacccagagaacaaggtaccttcacttgagcacaacaatcaggtgaaaggagaaagcttggatttggtcaagtacattgacaccaatttcgaagggccagcattactccctgatgattctgagaagcagcagttcgctgaggagcttcttgcgtacactgatgcgttcaacaaagcatcgtactcatccatagtcgccaagggagatgtgtgcgatgaggctgttgctgctcttgacaaaatagaagcttgtctgtaaagttcaacgatgggccattc

SEQ ID NO: 39782 - DNA, 287 bp, Oryza sativa
  Clone ID: uC-osroM202020a12a1
tgggtttttttttttttttggtttggtgcacaaacgcgcagattaaaagtgacagagccggctgacccaaaagagggcacacaggttaccacaacctgggttggaaggctgttaagcccctagcataatatcgcccccaggaaacgggtttaagacacactgacatgggaaacagggaaacgtgcccactggccgaataatgggggagcagacagttcttaataagggtcttgacaaaaacaaaattgagggcttagacgcccacccctactggagaacatgacacg

SEQ ID NO: 39783 - DNA, 378 bp, Oryza sativa
  Clone ID: uC-osroM202020b02a1
ttggttttttaatttttggggtttttttttttttttttttttttttttttttttttttttttttttttttttttttttttttaccaaaaaccccccctttttttaatttgccaacaaattataaaaatttctttaaaaaaaaaatttgggcaaaaaaaacccgaatttttttttaaaaaatccccccccaaaaaaaattggggtccttttaaaaaaaaaccgccttgaaagggagggaaaaaattattcaaaattggtaaaaaacaaaggcccttttaagggtccaaaacccaaatgggaaaaaaaaaatttttaccgcattttatattggttttttaaaaaaaaaccccaaaaaaaaaactgaatctttttttaaag

SEQ ID NO: 39784 - DNA, 333 bp, Oryza sativa
  Clone ID: uC-osroM202020b03a1
catcatctatttataataataacaataaaaccaccaatgccaccccatcaacattaaacaaccttttttatcatcatcaaccaaccaaaaaccaaactataaacttcctctgctccatttctgcctccattttcaatggacacccacatcataactatgcatttttttttcaccccttgtgtgactgaaaataactaccacttccccttttgccttaactgctttaaaacccatcccctgctgctgaagctaccccattccgtgattcccccaacaaacctggctctcaagtccttcctaaaaaccttccccgaagggctcttggagatagaa

SEQ ID NO: 39785 - DNA, 397 bp, Oryza sativa
  Clone ID: uC-osroM202020b03b1
gggaacctgaacaatataattaatcattttacttatactgtataaatctgatgtgttattctttgtatcgctgcgttccgtaacaaaaagagtatacaaaataaaagaggtaccggatatacacgaaatgccacaaagttaagctactgacagtgacacagacacacaggcaactatgatgccagaagatcccctccccttttattgctccaaggctatatctatatgaaggaatgaaggctatgatgacttcatacaatctactccatgattttggagctgaattgtgctacgtcttgaactagatactactttctgtctcgatgatgtctgttgcagcatgcctgatgctcttacggaacgatacaaaccctttaccacttgtaaaccctgtacc

SEQ ID NO: 39786 - DNA, 418 bp, Oryza sativa
  Clone ID: uC-osroM202020b04a1
ttgggtttttttattttttgggggaaacaaaaagtatctccaaattaatcatgctcaaatttaagttatgctcaaacaatacattatgacaccggcagagaattaacaatacagcttgggattttatagctggatattaatctggccccatcataacacacacggagatactcctatatatcaaccgagcgaagaagcacacacaagatcacacaatcaggccaggttgcttcgatccggccaccggccggtcacagcccgccacggccattatgggtgatgccggggtggtggtggttcgtgtatggccggaatccccgtgccagcgccgcgctccacgccttttgcacgccggtgaccctgccgccgtacttgtgcccgtcccactttttcagcgcgtgaacgatccccgtcgtcc

SEQ ID NO: 39787 - DNA, 425 bp, Oryza sativa
  Clone ID: uC-osroM202020b04b1
aggttcaaatccaacttattcataaagcatactgctgtcccacaggaaactgtttcataaaactaacatatcatacggactcgatggtccattaaaccagacacaagtagacatcagcaccacaaatacttgacgaacagaggctcgggacgaccaggcacatcggcagctccaccaaactggctgattactgaccaccacggaggcggagcaccaggtggagggtggactccttctggatgctgtagtcggcgagggtgcgtccatcctccagctgcttgccagcgaagatcagacgctgctggtctgggggaatcccctccttgtcctggatcttggcctttacattatcaatggtgtcggagctctcaacctccaaagtgatggtcttcccagtcaaggtcttaaccaagatctgcatacca

SEQ ID NO: 39788 - DNA, 499 bp, Oryza sativa
  Clone ID: uC-osroM202020b05a1
ttgggttttttgatcataacggtttttatttatattggataaatcatcgaagttacagctcaacggtacatttaaaaaaaaaggtgcaatggcaaaaaaaaactgaagttcacacaattgtctcactaattaaagctatctacggctttctacatgtagaactgattcattggccgtttctcttttcatctgtaatctgtaaatcctttagtcttctatatcctctcacagttgtaggcaagtgaagcctctgctaaacgtctcttttcccctgtgtactcctgatgcttccagttgtcagagtatcatccatctgcaagcacaagaataattcatagtgagaaacaagaccatctttaaccatacgaagaacaagaaataacaaatttgcacttatttttcttttcttttttttttgacggcaagtggatatggttttgttccaaccacatctggacaattgtttcattgttgttaagcgccacttaaattactcaca

SEQ ID NO: 39789 - DNA, 479 bp, Oryza sativa
  Clone ID: uC-osroM202020b05b1
ttcttccccatttgaactccctcctcctccactttcccccccgcatcgagcagcgaagcggcgatggcggaggagcagccgcgcgcggcggcggacggcggcggccagacgctgatggagaagatcgccgacaagctccacatcggtggggacgggtcgtcgtccgactccgacgctgacgagcgcaagcagccgaagccctcggcgccgccggccccggccgaggtcgcaacggagtcgtttgttgattcggctgctgctgccgcggccgaggccaaggccaaggtgttccgcctcttcgggcgcgaggagcccatccacaaggtcctcggtggaggcaaacccgctgatgtgttcctatggaggaacaggaacatctctgccggtgtactaggcggtgccactgcgatctggatccttttgaattgcttggctaccaccttctgactttcgtttgccatgggctcatattctttttg

SEQ ID NO: 39790 - DNA, 502 bp, Oryza sativa
  Clone ID: uC-osroM202020b06a1
ttgtggtttttaaaacacgggggcatgcatgcatgcataagcttcatcacagaacagcaaaagcaggagatgggaaatgagttttcatccaaatgtgcatagtacagtgccaaggtgaaacatcgaactatagcaaaagggttttcagttgacctctgattcaccccatccctaactatgccatcggttggtcacaggacatcaaaggcaggtgatgggaattgagtcttcacccaaataaatagcaaaagaaaggtttcacctgacttcagattcacccctcctagctatgccatcgtccaaccggaagagaagtcatgtggctacaacactaatgcccataatagaatctccaagggacaacgaggatatatatacatggtgagtcgatagtagatgtggagttctagcagacttccgtcttaaatctaaggcagatccccatgctgaatagcttttgatagagcagctttgcgccgtagggcacattgatccttactat

SEQ ID NO: 39791 - DNA, 481 bp, Oryza sativa
  Clone ID: uC-osroM202020b07a1
gtcaaaaatggggatggaagaaaccaaaggcttcacctttgaattgtgtcatttacagcttccacaaaccttgcagaaaaaaaaaaaaacacatccaaatataccaaggaattgcctgcacatatcaccaacacctaatatgtacaccgtaaaattcccgaggaaaaaaaaaagaagacaggaaaaattttctctccctacgtttatattacaaaggcagagggcatctacgagaacgacttctgcttcttctgcagttagtgaatatgcagctgccattttcacacgccttgacttcaagaaattgtttgagtacctttgctgcacatgtatcttgttctcatgtaattgcgcagttaattttgcctctaggtcagatggtgtactacagatcagaacatgggcggttccatctcgacaccttttgtgcttcattcttttgggaacacagcatcttggacaaaattctgtgccatggcat

SEQ ID NO: 39792 - DNA, 445 bp, Oryza sativa
  Clone ID: uC-osroM202020b07b1
ttgaggaaggaggaagaggtggtggtggaggagaagagccatcagcagcagcagcagcaaggggaggaggagctcgtcggcctctcgctcgccggcggcaggcccaaagtatttccaatgtcgagccctccacctaatccttcgcaacttacaattttctatggtggatcagtatgtgtttatgactcagtgccgccagagaaggctcaagcaatcatgcttattgccgcagcagctgctgcagcggcgtctgccaccaaaagcaatgctgccattgctgttaagccccctgtgatgcctgcagccaatgctacccaagcagcagtctctcctgtgctcacaagatcgctctcattgcagagcacttctgtagcaactggacaacctcaagttgccgctgaccctagctcaatttgcaagctccaggctgatctccccattgcca

SEQ ID NO: 39793 - DNA, 388 bp, Oryza sativa
  Clone ID: uC-osroM202020b08a1
tggtttttaattaatacaggggattattttgtaatcagccttgttcttatggtcaaaaacaatacatcatctatgtataataataataataatattattaatgccattttatgaacattgcacaagctgctgcagcagcatcaaccaaccaacaaaccaaactataaacttcctctgctccatttctgcctccattttcatggacagcaacatcatatctctgcatttttttttcaccggttgtgtgactgaaaatagagaaaacgtcggcgttggccttagctgcttttgggcgcatcggcggcggcggcggcgacggcgtcggggatgccggcggcgagcctggctctaaggcctttcttgaggaatttgccgaagggttcttggg

SEQ ID NO: 39794 - DNA, 442 bp, Oryza sativa
  Clone ID: uC-osroM202020b09a1
tggttttttataaattttttgggttttttttttttttttttttttttttttttttttttttttcccacccccaaatccaaacccttggcccttcctatcaaaaaaccaaaatgaaccggttttaaaattcatttcccaactcgacaataatttacccccccatttaacacatttttccccccttctaaaaccccccccttttttttcccgggtaaaattaaaattaacttgaggccaccccgcgtccccggcggcaaaatttttccaggctgggcgtcctcttggcggcccccaaaataaccggaaccaggtttttccccaaggggcccctaaggtgcttgaaaaggttttcaacggggccctcccccgtaacctaggcctggataaaaaaccccacccttgaaaacatggcccccccccccttcttgatccccttcacctt

SEQ ID NO: 39795 - DNA, 367 bp, Oryza sativa
  Clone ID: uC-osroM202020b10a1
tggttttttaaatattttggttttttatttttttttttttttttttttttttttttttttttttttttttttttgcaaaaacaaacaattttggtttgaaaaataaagccataacggggcccatgccttaaaatatccaaaaattaaaaacttaaaaagtccccaaaaccgactaattggggccaaaatttaatccaaaaaaaaactggtaccccaaattggaaaaaattttacaaaaagtcccggagggcttaaccccaaaccaaaattttaaaaagacccattcaaaaaatttgaaaagctcaaacaagaaaagccattcccttttttaaaaagccgcacaaaaaggttatcaaagcttggcaaa

SEQ ID NO: 39796 - DNA, 489 bp, Oryza sativa
  Clone ID: uC-osroM202020b11a1
aaactgcacaggctggtccttgttatcaacaacactccaacagtcatgctgatacaggtagcaatgcatagcggatttacagccaaacccagacagtactagcataagcacaacgcatgtgccagaatttattcttgttcatagagcggaaaccgcttctttattacattgcactggcattactacataaggtttgcgctttgcctcctagcacagaacttgggccatctctcatcttcactggagttccttcaggaagtcggcgttatcaaccaaaaccactttccagccatcagggtcaaggaaagaggcaatctttgtgttgagccctggtagtggacctggctgccgcaaaatctttccccctagttcttttgtaaccaactcaacagcctcagcactcttgtagacatcttcagtgccaatagcaacctgagcatatgcgttgcccttggtatattctgtgacaccatagttgtatgtcaactc

SEQ ID NO: 39797 - DNA, 342 bp, Oryza sativa
  Clone ID: uC-osroM202020b12a1
tgggtttttaatgtgctggggcactgcacacggtgcaaagtcagctgctgtattcacaacataccgagtttatttctaagaggaaaaactctactactgtaacacaatatgacaacggatcccgttattactagattccattagagttctttaaggaacctactaaaggcttacagagcccattttaggggagccaaatccgctacactatatgcatcttagccgaatcgggaaacatagtacattcatttttgggtccaaaaatttaccggaatcctttccaactacattaactcgcgaaccaatgacacgattgctacctgacatcctttttttactgca

SEQ ID NO: 39798 - DNA, 384 bp, Oryza sativa
  Clone ID: uC-osroM202020c01a1
atccaagcacagttgcacaccacgcatacataatacaacatcattagtaactgggacaaaatggcaagagacaacacacggtttaaccggtggatcatagcccacattaaggggtttggtaaaagaaatgaaggtcttgcgttgaccgataataatgcatgcgcatgcaggtaagtaacacgagcactggaatttattcgggggcttgttatctaaaacgagcgatgatacggggtccgggggccggcctgcccgagaaaagaaggccccctgcggcggaggcggcggccgccattatttatcaacccgggcccacgtagtggttgcccacataggccattccctgcaggttgggctggctgggcaccacgcggaaggggaaca

SEQ ID NO: 39799 - DNA, 315 bp, Oryza sativa
  Clone ID: uC-osroM202020c02a1
aattgttttttaaaattttattggtttaaaattttttatttttttttttttttttttttatatttataaattcaaaaaccctaaaaaaaacaaaaaaaaccaaaaaaaaacaaaaaaaacaaaaaaaaaaaaaaaaaaaaaaaattaccaaacaaacacacaaaaacaaaaaaaaacaaacacaaaaaaaactaaaaaaaaacaaaacaaagcaaaaaaaacaattcccaaaaaaaaaacaacatgcgtgcatccaaaaaacaaaaacaaaaaaaaaaaacagcacaacaaaaaacgaacaagaaaaaaaacaaa

SEQ ID NO: 39800 - DNA, 444 bp, Oryza sativa
  Clone ID: uC-osroM202020c02b1
ctaggcgttactccggcacctcccgcctctctctccctcgccatggacgcggcggggaggaggctcgcccgcgtcacggcccacctcctgcccagctccctcccgctcccgctcgcctccgcccctaccctcgcgccttcccccgccgcgtcgccagcgtcggacagctaccgacgggtccacggcgacgtgccgtcggagcccccggagtggcgcgcggcgacggacgagtccgggaagggcttcgtggacatcctctacgacaaggccgtcggcgagggcatcgccaagatcacaataaaccgccctgatagaaggaatgcattccgacccctgaccgtgaaggagcttatgcgtgctttcgaggatgctagagatgatagttcaatcggagtcatcatactaacagggaaggggacccagtccttctgtagcggcggtgac

SEQ ID NO: 39801 - DNA, 450 bp, Oryza sativa
  Clone ID: uC-osroM202020c03a1
tttgtttttttattttttgggtttttttttttttttttcccctacaaaatcgaagtaagaaaaaatttgtaacaccaaaagaatttatccataaatatttggatttaatacaaagaaacttgtaaaacatatatgggatgaaacatggaaaaaatgacaaaaaaatatgccaatccaaatttagggcctttttactttccgagggctggatctaagattccttcgatgaactcgggcctttgacgtagggacccggggctccttaccttaaatgatcttgccttcctaattgggggagtccaaagcaatggccatctccttaatcgctggttcgccacgatgggggaatcccccttctcctttccactggcgagcttttagaaggttttttactttgcccgaacaacagttgttttccccgtaactatcgccaccaggcggccatggaaa

SEQ ID NO: 39802 - DNA, 393 bp, Oryza sativa
  Clone ID: uC-osroM202020c03b1
ttcttttccggtgcccggctggcggggcttggcgtcaagtttcaggcgtgcccaaagacggagctcaccttctacctggctcaagcgctagctcggccgccagatggacgcagccaacgcggaggccaagcacgtctactacctgccgatgagggccgacaacagtaacacagagagcgactgtaccaccattgggaagcagcgttgcccgctgtgatgatcttggcgaggggcttaagaaagctggcggtggatggatcaaacctcttggacgatgaagtcacaaaggcagagataacagtgccacgtgcttttagtgacgtgcaaccgacacttacacacgaatctgggcggattgcagcgttgctagatgtacgcattacaaaccaacct

SEQ ID NO: 39803 - DNA, 413 bp, Oryza sativa
  Clone ID: uC-osroM202020c04a1
tttggttttttataaatttttgggtttttatttttttttttttttttttttttttttttttttttttttttttttttaaaaggccaaccaaatggattggtattgcctcaaaaaaaaaaattttcccaacaggggaaaaacccctccaatttttttttttttattaaaaaaaaaaggccttattttttggccaccgggaaaaaaaaatcctatggaaacctaaaatttttggccccattttatcctatcaaaaaaaaaaaacaattctttgggaaaaaaaaaattatggtttttgggccaccccccaaagctacgggattaccttacaaaaacccttttttttttgcccccctcaaattggcaagaaaaaacaaaatttttaatttaaaaaaggttaaaacaccaatcctttt

SEQ ID NO: 39804 - DNA, 468 bp, Oryza sativa
  Clone ID: uC-osroM202020c04b1
tttcactctcccctgcccccgtcgccgtcgccaccgccgccgccatgtccgggaggaagaagacacgggagcccaaggaggagaacgtcaccctcggcccgaccgtgcgcgagggcgagtacgtcttcggcgtcgcccacatcttcgcctccttcaacgacaccttcatccatgtcaccgatctgtccgggagggagacgctcgtccgcatcactggtggcatgaaggttaaagctgatcgcgacgaatcttccccttatgctgctatgcttgcttcacaggatgttgctcaaagatgcaaggagcttggaataactgctttgcatatcaagctccgtgctactggtggtaacaagacaaaaacccctggtcctggtgctcagtccgcacttagagcacttgctcgatctggcatgaagattggtcgtattgaggatgttactccagtgccgactgatagcacacgca

SEQ ID NO: 39805 - DNA, 497 bp, Oryza sativa
  Clone ID: uC-osroM202020c06a1
tttggttttacaatggaaatgggaccacttaaggcatatataattaaaaaaccagatcagcaaaatttgtgtgcctcggtgtacaatacagatcaacagcttacaaaatctggcatgcaaatctaagctctcaccacgctatgaaaaatatcccctttgcaactgtaagctaggaaagaatatgaccacaacaggggaagaatttgggagccattcactgtccatttgttgtttattcaagccgtttctttgaatatacggggaagcacttcgtggatgctaatgtccaggagctcaggactcctgcataatactcgtcccttttcagttgtgctagggacaaaccatatcttccgcagaattggtgactcaaattgcacaaagaaaccatcactctggtcaagcttccattttcttgatccctgtcctttccagacctgagggtacgagatggcgctcttaggtgctactatacaagcagcctttgagaaagactc

SEQ ID NO: 39806 - DNA, 497 bp, Oryza sativa
  Clone ID: uC-osroM202020c06b1
cataccctcgctatcttgtttaccctgtcttgcagcagcagcaagtgcagatcaccacaccacatctacacccgttgctctcgtgcttaggccgcaggctgccgcatgcgtttggtgtttcgtctgtcggggttcacgcgttcgggtcttcaagtcgagtctccccggggctggttgcaaacccacagcactgatctgttctgacggttgaaggcaactttcagaacccgctgctcttggatctccgccgtcgttccattcagagttatctcagctgatatgacaccaggcacgcaggacgcggggccacacggctctgaatgcgtgtcagcagccccaaccgccattaagctgacagctactcctcaggcaataccaacatgagtggcgggctgcacctggccaaaggaggagtgtgaaacaaggcgccaccaaggctgctgaatggcaagcatgctgctgcaagacccctgacggcggcgtggtgacctagtaat

SEQ ID NO: 39807 - DNA, 497 bp, Oryza sativa
  Clone ID: uC-osroM202020c07a1
tgtttttgataatttaagggcttaatagtaatagactctttgatggagtattacaacatgcagcagtggcattaatacgccagtacattaattaagttacacatatgcaggctccattttggtttcttttaatttatcgtattacagaatttctgtagccttgcagatgatcacttggatatcatgtactagtaattaacaataggatgcatacaaaagatggcccaacgacaacagaagatgcgtgcatctgacattgtctggccttatttgttggtagtactccaattaattaacaagagatgatgcattcttgtgccttagtttcttcacatgcttggctttacgttgagcctattcgcaatctttacccccaacgactcatcacactgggagaggtagttgacccaaatggcgcggagctaaggggagaccttggggtgcgcgagctcgccggcgaagcggcggatgaaaccttcctgtctatccggcgccca

SEQ ID NO: 39808 - DNA, 481 bp, Oryza sativa
  Clone ID: uC-osroM202020c08a1
tgttttttttttttttttggtttttgcacgatcaaaccaatacattacagaggcgaaaggaatcaagtacacaggcctcaaaaagaatgtttgcaactcatatattacaacaattacaatgccctccaaacttgctaactatttccagaataagttcccctccaaacccgctaactatttccagaataagttcctagagtttcaacaaagctagtcatctgaatgttcagactaaaattttgttgtcaagaccaggtcaccattccgctcattcagagcagcgccagcgacacctaacatttttcctccgacaaaacggtaagccacagaaccatgacccctggctgaacagagcgaaaaggaacttgatcacgcgctaggataatttacacctaacaaactcaacactaattacattagccgatgctggcgaaggcccttgccaaaatggggttgcattaatttaacatagagaccattt

SEQ ID NO: 39809 - DNA, 375 bp, Oryza sativa
  Clone ID: uC-osroM202020c09a1
aaaaaaaccccccttttaattaataaaaaagggggcggggtaaaaaaaagaaaaatggtttggaaaaaaagcccgggaatctggctttaatccccccaaaaaagaaaaaaacaaaccctttccgggcccccccaaaaaaaacatttggccccaaataaaaaaccgggatttcaagtgtttcccactcctaaaaaatgggggggtgaaaaaaccccccttttaatttgtttaaccccccccccgaaaaaaagggggtccccccccccccccttttccccctttacaaaaaaaaaaaagggtttttttgccgaaaaaaaaagtttttctttggggggttaccgaaaaaattttcccaaaacaacccccggttgaaaa

SEQ ID NO: 39810 - DNA, 493 bp, Oryza sativa
  Clone ID: uC-osroM202020c10a1
ttgtttttttaaatttttttgggtttttttttttttttattttttttttttttaaaaataacaaaaaactattaatataaaaaaaaaaaaaacaaatcccagaataaaacaaaaaacaacaaaaaaacaaaaaaaaaaaaaaaactaaaaaaaaaagcaccctttaaaaaacaacaccaaatataatacaaaaccaattattttcaaaaaaaataaaaaacaacaaaaaaaccaaaaaaacaaaataccaaaaattcaaaaataaaaaaaaaaaaaaatttccaagaacactaaatttaaaaaaaaaactatctaaaggactaaattttaaaaaatggaaaaaaactaattatagaaaaaaaaaaacatctgaaatttcaaaacataaaaaaactcttttccaaacaaaccatttaaaccaacccaaaaaaccaaatttttaaaaaaaaccaaactcccatatttttaaaccttataccccaaaaaccaatcc

SEQ ID NO: 39811 - DNA, 481 bp, Oryza sativa
  Clone ID: uC-osroM202020c10b1
ttgttaaatgcaagttaagttagtgcactgaaggagagcctgagatacgtcgtcgtacacacttgattaattaatggcgtggaggaacagcgggcgggtgaaggtgctgaacaggaggagcagcaggatggcagtcatggcagccgccgtgctggccgtgtgcagctttgcggcggtgaccatggcccagctggagatggacttctacagcaagacgtgcccgaacgtcgaggagatcgtccggcgggagatggaggagatcctccgggtggcgccgacgctcgccggcccgctcctccgcctccatttccacgactgcttcgtcagggggtgcgacgcgtcggtgctgatcgactcgacggccggcaacgtggcggagaaggacgccaagcccaacctcactctccgcggcttcggggcggtgtagcgggtcaaggacaagctcaacgccgcctgcccggccaccgtctcctgcgccgac

SEQ ID NO: 39812 - DNA, 487 bp, Oryza sativa
  Clone ID: uC-osroM202020c11a1
tggtttttttaatttttttggttttttttttttttttttttttttttttttttttttttttttttttgggacaagggggggcataaaatcaacatttgggggggttttattttacaaaacacccccatgcaaggggccattaaccaccaacccagttttcctaatttaagggggaaaaaaaaaaagggggacctttcctttttccaaaccctcccaggttggttggcatcacaaaactaaacagggggggggaacccacaccaacgcattgatcccgtttgaattgcccccgaaaaagcttaaattaaaaggatgaggaaaaggggtcaaaaaagggggggtggaacgggtccctaagggggggggccccaatggtggggggccccttgccgggggggggggcctgcacgggaaaacccaggaaggggaccctggcgaggggggcctgcttaaactccggcagggggagccgcttttttttttttcg

SEQ ID NO: 39813 - DNA, 437 bp, Oryza sativa
  Clone ID: uC-osroM202020c11b1
atctagtagcctacaatttctaataggcactgacaagcaccgttaaaactcggtgttatgctgtagtacaaataacacaaattcatcgattctcatacagaataccaattccataattagttcaggcttcctggtttctgttcataatcatatataccaaccagtgagaatctgggggaaacaatgaaaagcatagttttaaaagtggaataattcagaaggtaagatatgtctgccaaatgatacatacaagtgtagaaagcattctaaacaagaaactttacaagatttcagcccgtgagttctaagatgttctccactgcaattccaactggatgcggccatttttcgagtcaattagatgatatttctcattgatcctcttattgtttataacatctgcaagacttatgacaacatagccaagattttccttg

SEQ ID NO: 39814 - DNA, 381 bp, Oryza sativa
  Clone ID: uC-osroM202020c12a1
ttgtttttttaattttttgggtttttttttttgtttttttttttttttttttttttttttttttttttttttttttaggcccaaacttaatacattcattttacaagaaaaatgtttaaacaaaaaagttttttaatttacaagtttttaaatgacccgtaatcaaaaatgaaaaccaaaaacccaaaaaaaaacagttaacaagttttttttgccaataccagccccaattaaacctggggagagttatttagggcattaaatttaaacttgggacaaaaatttatgcaaattcgggggctttaatccaaaacctggggggatattaacttttggaaacccaaaatttatgcccccatgccacgggttccccattcaagg

SEQ ID NO: 39815 - DNA, 399 bp, Oryza sativa
  Clone ID: uC-osroM202020d01a1
tgtttttttattttggggttttttttttaaagcacaagccttccttttttttctttttttttttggaaaagtatacaagaagggctcaaattggtgttcccttgggcaaacaggccatttccgtggaaggtcatgaaagcgtggtcacagattacattctaaaagtgagtacaacacactacaggaaaatagagaaaaaaagaagaaatttccatgactagaactaattaagttgctattgcaaattctgggactggaaatatgtgctgatacaatggttggagaccctaccagcagaggtacttcaggaggacaaaacaaacgtgtcacaaatgggatgtgcaatccgcagtcaacaaagacctaggcatgacagtgttctttgatcatagggaaaaa

SEQ ID NO: 39816 - DNA, 436 bp, Oryza sativa
  unsure (1)..(436): unsure at all n locations
  Clone ID: uC-osroM202020d02a1
ttggtttttatttcctcatggtttttattcattcctcccagagagacggatccatggaagttttcttgccctcatcaggcaagcagagcacacacacacggtggcagtggaattgctatgaacaagacgctaatcaacatccagagctaaaacaaacaaggggatcaaagcaaatcccgaaaaaaaaaacacaggggaaagtccacatcttcttctcgtccccaacgcctccgtgtcaccaccacgtcttgcggattttttttaccctgttctattcgctcaggcgtccacgatctcgccgtcgtccttcgacgccaggatcagctccgggtgcgccgccgccgccgncgnctttttgatcgtgccgtcgatggcgttcggccggccgagcgccttcagcgccaggtgcgccgccttctggccggagatcatcatg

SEQ ID NO: 39817 - DNA, 53 bp, Oryza sativa
  Clone ID: uC-osroM202020d02b1
gattcaaagaacacagagggcacgtcggtgtccccgacaccaacaataccatt

SEQ ID NO: 39818 - DNA, 501 bp, Oryza sativa
  Clone ID: uC-osroM202020d03a1
ttggtttttttaaacgagcgggaagccaccctcggatgaatgtcatcgatcatttacaagcaatgatgctctactcttttaaaatacaagcggcaaccacgaaattaacaaatgtaaccaacgcgaaaccttaacagatatacaacagcaaatatagacacgtgtggaacaaccgtagtagctagcttggaactctagaactatttcttcccacccagcaaaggttggccactgccatttggactaggcatgctcgccgttctactcatcttgcctccaccataactcttcacatcaatcaaatcaccaaacaaattgtctggcatgtagtatggtttggccgcagccgctgtagtttctgatggccgtggattaccattcattctaacatcttgagccattgccggaccacttcttgtttgagaaacaaaggagttgtactgttgcatcggtttggttgcaggagatggcacttgttgccttggcggagcagcatacggc

SEQ ID NO: 39819 - DNA, 389 bp, Oryza sativa
  Clone ID: uC-osroM202020d03b1
gatcaggagcacgcaaggcgcgcggccatggcgtcggagaccgagacgttcgccttccaggccgagatcaaccagctgctgtccctcatcatcaacaccttctactccaacaaggagatcttcctccgcgagctcatctccaactcctccgatgcattggataagattaggttcgagagcctcacggacaagagcaagctcgatgcgcagccggagctgttcatccacattgtccccgacaaggctagcaacaccctgtcgatcatcgacagtggtgtcggcatgaccaagtcggacctcgtcaacaacctcggtaccatcgccaggtcggggaccaaggagttcatggaggcgctcgctgctggtgctgatgtgtccatgattgggca

SEQ ID NO: 39820 - DNA, 489 bp, Oryza sativa
  Clone ID: uC-osroM202020d04a1
ttgggttttttttttttggggggacagtttgcatacaacagcattgcaacccaaatccttttatccgaagaacacaacgacgacagcaaccagccgagtgcagaggcaaaagaggagctcacatcctgctcttcttgacggggccgagctccttggccttggtcctcagctcgtgcttcttgatcttccccgtcgccgtcttgggcagcggcccgaacaccaccgacttgggcacccagtaccccggcatcctctccctgcagaaccgcatgatgtcgccggccaccgccgcctcgtcggagctgtcggcgccttccttgagcgtcacgaacgcgcacggcgactccccccactgctcgtccgcccttgccaccaccgacgcctccagcaccgccgggtgcgcgtacagcaccttctccacctccaggctgctgatgttctccccgccggagatgatgatgtccttcatccggtccttcacctcgatgt

SEQ ID NO: 39821 - DNA, 492 bp, Oryza sativa
  Clone ID: uC-osroM202020d05a1
ttgggttttttttttttttggggttttcaacaaagtagttctactaacttaattatcaacagatgaacagcaaggtaccacttactactccttaatacataacaagcattccggcagctaagatcttacagtagactatatagagtcatccactaataacttacacaacagaatggatagcaaactggcgattctttgcctactatcttgctcactcctagcagttgataccacatttttgggtatcagggcctgtgacacggggggggaatggatcgatacgaacccacaggaaggagaagatcgatgcaaggaggatggcccaaacaacaacaatggtcggggtacggttctgccgacccatgagacccttaaggaaggggtacaggtggacaatcacccagaaggcaaagaagagcttcccaaagagcggaccccatgactggtagccactgttgatagcgtaggagataccagcaacaacaccgacca

SEQ ID NO: 39822 - DNA, 377 bp, Oryza sativa
  Clone ID: uC-osroM202020d06a1
ttgggttttaaagaacaagggggaacaaattaattaattacacagtacatttcctgtcggaaatacgtatacgattgggagttttacagtaattaattaaggtcggattaataatacaaatccagcttctgcatcactccctcacccttgggaacatgcacctgtacacctttgataagaaggacctcttctcggcttttctccgaggatgccgcgccggcgccgcctgcgccggcgacatgcgcggcgtgacgtccggccgggcggcggcggatgtcttcgcaacctcccggtgccgcttcaccttattgaactgtaccgagaagtcctgacccgtcgtcttgggcgcactgtactctctgaggccctacttggat

SEQ ID NO: 39823 - DNA, 482 bp, Oryza sativa
  Clone ID: uC-osroM202020d06b1
tgtttttgacctttttttttttttttgaatctcatgatagtggacgtgtggaactgatgatatcaattacaagaaagccaagaatgtgttggctcttttagaggagcagtaaatgaagtaacaaaaaaattactctataatgttcctctgcagttccacttccacaaccaacaccccccacacacaaacatcaaactatgttctctccctttgccctgtatgtcacctacgcaattacgaagaatatcacgggctccaaaggtttcaggtggtgttaaaggtgcaactgtagtttcatctgcggttttacttgtacaactgaattggccatcagaatagccaatgcgaatcggaattagctgatgaaatgcaatgacatgtatctgcaatacacacctcaataaagcttcgtgaactcggctgtctggttaggttcaccaagtctgaatgcatccctttcaatcaggatctgcaaggagctc

SEQ ID NO: 39824 - DNA, 451 bp, Oryza sativa
  Clone ID: uC-osroM202020d07a1
tgttttttttttttagggggtaatatgaccttcttctaggataataagagcttctatatatacaagggggctagaaaatcgaagcctgcagttatgtgcccaacaatctaagaaaaatgatggcataaaatgtctatatgctgattgtacaatgacaccgtatagttatttcttccaagccctatatgctcacatcttcctcagattatcaagccgggcctgtaggtcgtcatctatcccaccgtccccacctccagcggcttcagcttgagcggcaacctttcctgctccaaccggtgcagcaacagcggttgaaggagccccgacaagctctgagttgacgtcgatgccaatttcgtcaaggacctggtttaccagtcttttggttcttcctcctcctcatcgccctccaaagcatcggcaatggcatcattcattgtgctactgacta

SEQ ID NO: 39825 - DNA, 372 bp, Oryza sativa
  Clone ID: uC-osroM202020d07b1
ttggtcgccagtcccctcctcccccgcgctctccctctccccctcacgccgtcgcgtcgctgtccccgacacctgcgcctccgcctcccgctcccgccgccgcaggtccgccgttcgccgcctccgttgccgaccgccaccgccccgcgccgccttccccgcctcagcctccgcctgcgcctccgcctccgcctccgcgcatcgcaacgcaacctcaggcgcagaggcggcgacttgactcccccgtccccgacctctagctctaggggtagctgccctacacggtatagtcgacagcccaccccttatcttgtcggggctcccatgtacgtggcccgcggggcatggatgggaggtcgtggggcttcggat

SEQ ID NO: 39826 - DNA, 311 bp, Oryza sativa
  Clone ID: uC-osroM202020d08a1
attgttatttaaaaattttttgggttttaaatttttttatttatatttattattttttaaaaattacaattaattaatattaaaaaaaaaatacaaacaaaaaaaaaaaaaaaaataaaaaaaaacaaaaaaaaaaaaaaaaacaaaacaaaaaccaaaaacaccacaaaaaaaaaaaaaaaaaaaaaaaacaaatctaaaaattcaaaaataaaaacaaaaaaaaaatcccaaaaaaaaaaaaaacaaaaaaaaaaacaaaaaaaaaaaaaacaaaaaaaaaatacaaaaaataaaacaaaaaaaacaaa

SEQ ID NO: 39827 - DNA, 500 bp, Oryza sativa
  Clone ID: uC-osroM202020d09a1
tgttttttatttgaatcaggctccaacatacttcaaatcatagaccacaccatacagcaaacatagtataaacattgtcatagagagtacagctgatagcagcttgtaatattctagcattactttggtagcatccctctacaaaacatagcagacatcaccagctcttcatcttggccatacacattcaacatggtttgctagtgacagaccacactgaccagaacatttcgtctcctcagtaggcaccagctgccatgagcagctcatcaaggctccagatgccctcgttgcttgccccgtcttgtgtagcatcattttgcagaaggttgtccattgattcatctgagctgctctcaacataaggtaatggcaaatacttcatctcgggatcgaaggtgggcatgttttgtgcgagattaggcatgccatttccctggggcacggcgataccatagttgttcctcattctctttggcgctccacctgtcaggtaagca

SEQ ID NO: 39828 - DNA, 469 bp, Oryza sativa
  Clone ID: uC-osroM202020d10a1
tgggttttttttcagaaggggaattttattgtcatgtacatgttgatgtcatgttatgacaaggtgtaggcactacaacaatggcaccaattcagataattagaaacgcttcttgcatatatataccaagattgggctatctcaatctataaggaaagataaaaagtacttgatcattactgatgatcataaaataaagtacacttcaggaagaaggaatgacctaaaatggctccttcaacagaggaagaatagggctagacaaggtacacaaaggtaggcaaggccattgccgtcatcgttaacgttggcctcgatcagctgtctccgttctgctgcccgaagctgcatgatcctgagggcaagaaggagaagggattcttagagatgtcaaatccaggtcgagtgaagtcatcaagccccaccgaagcaaggatcaaagctcaatggcgagaaatagcgtggatca

SEQ ID NO: 39829 - DNA, 485 bp, Oryza sativa
  Clone ID: uC-osroM202020d11a1
acataaaaaggggagagccttttctatatcagtgacatgtccctacgttcttacacgaagcaagacagcttatagcataacagcagtactatgtttttcatgaggttaaatttttaccagacctactaaagcaccagttaattcagaaaagacactacataaaaaataagagccttttctatatcagtgacatgtccctacgttcttacacgaagcaagacagcttatagcataacagcagaattatgtttttcacgcggttagattgttaccaggctttttgggacaaaagcactattcttcagcattatcccctttctggaatgtaggagatttaccacgccccattgtaaagccccttgtcccatctggcattctcggtccaggaataggcttgttcacatgatcagaaccagaagtggcaggggatgagacatggccttgcccacttgtattttgctgaatctgacctcttccttgagatt

SEQ ID NO: 39830 - DNA, 418 bp, Oryza sativa
  Clone ID: uC-osroM202020d12a1
ttggttttttttttgttgggccactgcacacggtgcagtgtcagttgtagcattcacaacataccgagtttctttttaggaggtaaaactctacgagtctcacagcatagtaaaacgtagccagctattactagatacgagtagcattttttaagtcgcaaacaaaagggatacagtcccggcttaaggggtgtaaaatcagcttcactatcttcatgttcgccgcaacgggaaacagagcacaatcatctttgggtccaaaaatttacggcaaacctttgcgacgacgttgatttgtgaaccaatgacgagtttcctagatgacatactctgcttactgttgcgcgcactgaactctctgggcacctccaggcatcttatcgtcctcatcatacgccttctgagcagcttgggcttt

SEQ ID NO: 39831 - DNA, 435 bp, Oryza sativa
  unsure (1)..(435): unsure at all n locations
  Clone ID: uC-osroM202020e01a1
ttggggtgaaaaaaatgcacggatatatatatatatatatatatatatatatatgtatgtattattagaaaaaaaatggcatagatatagatacataagaaataagtgaattacaccagctggcgcagtggcacatccggaaaaaaacatgaaagaatgagggaaataaagcaaagaataaagctaggtcgtcacttatttattccagaaatggccaatggccatttcctagtgctccgaccctcagcaaaataatctcatcagtagttaaaatgggcacaaagcaagatgcccttgacatcaatggatctccatcaagggtaggcccacgaaggcgtttccttctttggggctgactcgggttttggctcgggcttagactctggctgnggatctgtttttgcttctggcttggattctggttctggttttgac

SEQ ID NO: 39832 - DNA, 455 bp, Oryza sativa
  Clone ID: uC-osroM202020e02a1
ttggtttttaacttttttgggtttttttaagctagaaatcttctcgatcgatcacacacacacacacaattaagggacatacatacatgcactggtgcaactgcaactgcagggtcggtgcgtggctactacaagtgtacacatggtacgttggttggcaccatctcgatcgtgtcgttgggctcacttgccggggacaaaattggtggcgtatgcccaggccttgttggcgacggggtcggggacgcggccaaagaggttcttgatggggcccttgtcggcgaccatggcctggacgaataagcccaacatggagaacatggcgaggcggacgttcttgaactccttcaccttgagctcggcgaaggtgtcagggttcgctgccaggccgagcgggtcgaaggcgccgcctgggtacaccttgtcgaggccctcgccgagcgggccgccaccca

SEQ ID NO: 39833 - DNA, 509 bp, Oryza sativa
  Clone ID: uC-osroM202020e03a1
tttgtttgacaaaagtaatcgggatggaagaataggccacgaacaaaatttctgacaacaatgctcttataaagtttacatttccaaagctaaaaggtcatatgaaacctcgccacatttggcgatgtatggaatacagaaaacctaccagcatatttacatggcatatatagaccacaaaaatgtgaggataaaagaagatattatctggggggaaaggacaaaagaagatttggttcaaaaccaaaaaaaaagtttccaaccagattttgcctgttgtttcaatgcccctatcgatgttggaagttcaactttttgatgcaaatggcatacatgaacgcgaaaaacacagcgaagagcacgagcaccggcgcaacaactggcataaatttcctgtgatatccaaaatgatgagtaacatagcagctgattgtctggttggattggccagggactgagatgatttgttctaggtctccatactgtgtcactatgagcccatacactgt

SEQ ID NO: 39834 - DNA, 487 bp, Oryza sativa
  Clone ID: uC-osroM202020e04a1
ttgggttgagcagagatgtgggtgaactttcgcttacacatagatagcaagcagtctagtagtggaccaatccggccttctgcacgcatacagtcactcacacgctactacgctatctttacatggagaacatatacatatattgcgacatagaagtgcatatgacatataattagtgtgcacatgtgtgcatgctgctgctgcatgcagcgctagattattcgttcgcagcaggtagcgaagttgtgtgatcagttttgtcaggcgtggtccggctcaccaggaagagcagcgagaacatcaggaggagcagcgaatacatggcggtctatgtcgtcaggtggactagcgaacacttggtccggatcatggtctacgtcatcatgggggctagagaacacgtagcggtggtccggatcatggtctacgtcatcagggggactagagagcacgtagtggccggcgcggaaggcctcggcagtctggc

SEQ ID NO: 39835 - DNA, 486 bp, Oryza sativa
  Clone ID: uC-osroM202020e05a1
tttggtttatatgtatcgggcgatgtcctctccgcttgtcgaaatgcaaataacatcatcgggggatatgatcatcagttcacgagaacagaggaagaaacaaaagctaaaaattaaaaccatcaacagcccgatcgagtttgcattactagatacacacattgcagccttccttccctctctccatgtatcgatatatcaacccggccacgcacaaaacatttgttcattccctactcgagctgcgcgtaccacaccccttggatcttgacatccttgggcaccttggcgccgaggtctgtgtccgacggctgcacgctctcgaagacgccaatcacctcgccggtctctggcttgctcttggtgacgctcaacgtgatgttgcccgtcgacgacgaggcgttcttgacgttctccttagcgagctcctcctcgtctcctctgcctccggcggggagcgccacagcgttgtcgtagcccgtagag

SEQ ID NO: 39836 - DNA, 490 bp, Oryza sativa
  Clone ID: uC-osroM202020e06a1
ttgtttttgatatgaataagggtcacatttcgacgacgaaatagaataacatctggcatttttcacccgtagatccctaagaaataaccattcaccacattaatttgacgaacaaatgctaagcaaatgaaatcaaacgtcggggaagcaatggaaacgaaggcgacgtcggggaagcagtggtggcgaaggctcttggctagacggcagcacgcagggtaggctgaggcaggctgagcgagtgcagaaggaagatcatggagagcaaaacctctggctgccacaaggcgtgacggactgggcaggggtgtaaatcatccaactgaatactgcagctcctcggattgcagattcattttctggagtctatgcctacgaagaactttgtttcaccaatacttccagatgctgcacttactgttgttccgaagacaatttgaccaaatttttattacgataaaagaaggcgaatactgttttctgatgagca

SEQ ID NO: 39837 - DNA, 389 bp, Oryza sativa
  Clone ID: uC-osroM202020e07a1
agagaaggggtatgttacacagtacaaagtaggatacgaggagagaaaaacgcagagaaaacatgtgttagtacaatgccatccatcaagatcgtcgtcaatggaagccatgagatggcagcagtagcagaaacagggaagcgacggcggcggccagcacacggcagccaccggcgccggcgctggatctcgccgccgccgccgagctgctgctgtcggtgggcttcgccgccgtcgccgcctcttacggtgggctggcaatggctacaggcggtaacggtgggtccagcacgtagcccggcttcagcaccggcgccggcgggagcgtctgtggcagcttccccggtgcctccaggtgcaccagcgcgccggcgttcgccggcaggatc

SEQ ID NO: 39838 - DNA, 448 bp, Oryza sativa
  Clone ID: uC-osroM202020e07b1
ttgtctcccccaaatctactttgcgtactctcgattcctgagcaaccatgtcggcctactgcggcaagtacaaggacgagctcatcaagaacgctgcctacattggcactcctggcaagggtatccttgctgcaaatgagtccactggcaccattggcaagcgctttgccagcatcaatgtcgagaacgttgaggagaaccgccgttctctccgcgagctgctcttcaccacccctggtgccctccagcacctaagtggtgtgatcctcttcgaggagaccctgtaccagaagaccaaggacggaaagcccttcctcgatgtcctcaaggagggcggtagactccctggcatcaaggttgacaagggtaccgttgaggctgccggcaccaacaaagagaccaccacccatggccacgatgatctaggcaagcgttgcgccaagtacta

SEQ ID NO: 39839 - DNA, 460 bp, Oryza sativa
  Clone ID: uC-osroM202020e08a1
aaacataaaagggaacaaacgcgcatattataagtgacgaagcggtctcacataaaacagggcacacaggttacaacaacgagggttgtaagcccattaagccccaaacatcagatcaccacaagcaaatgtctcgaagacacacgcacacggcaacaggataactccacactggcagatcatgggatagcagcagttatcaatcaggccttgacacacagaacatcaagcccccagacgacgacgactcctctagtactcgtcaccatcatcgccatcctcattctcgtcggactcagcgccaacctcctcgtagtccttctccaacgcggcgagatcctcacgggcctcagagaactcaccctcctccatgccctcacccacgtaccagtggacgaaggcgcgcttggagtacatgaggtcgaacttgtggtcgatgcgggagaacaccttcacgacg

SEQ ID NO: 39840 - DNA, 480 bp, Oryza sativa
  Clone ID: uC-osroM202020e10a1
cccaaaatggggctttcatagttcgacacaaccaaatccaaatcggatgcacaacaccataaggcaaacacaataaccaaagattcacccaaataaaatcaacaaagggatccatgggagaactccaatccaccccaacaaaattagcattgcaacctaaagcaattgacaaatcccttcttacatatccatcttgacctctttcttcagcttcttcaggtccggcactagatcgatggcgactagcctggatagaagatgaacagcgctggaccacttgatgttgtggtcacaccgttgccgcctgcgcttgcaccttcctccattgccacttacaaccaccagatccggagaagttgaggtcgttgccagcctttacgctgccctccaccggtccaccccaacgccagcctccgccttgctagatccaccatcaccatggccactgctggtctgctgccgccttcttgtccccttcgc

SEQ ID NO: 39841 - DNA, 485 bp, Oryza sativa
  Clone ID: uC-osroM202020e11a1
ggggttaaaatataatctgggaattttcatttccagaacataattatggaacattacacaattgagtacatttctcaggtcatactaaatacatacactcagtatgactgacgacccattttcatttgttacatatggctggcacaaacacatgttcagccacataaatgcatatatgaaaactatgagatctacatagatacgtatttcttgatttttttttcttttatcagtttgtattttcttgattcttgattatatatcacgtagctaggcacatttataatgtcgtatcaggagctagcacttgtaggggtatagtagagtgagctgagctgtacatgtctaggccaaggggtcgccagcgacgccgtggccggcggctttgggcggcggcggcgacggcgagggcgcgggaggcttgggcgtgggcgcgggcggcggcggcgtgggcttgggcttgggcggcggctgcctgagggcgc

SEQ ID NO: 39842 - DNA, 513 bp, Oryza sativa
  Clone ID: uC-osroM202020e12a1
ttgtttttttaattttttgggttcttttttttctcttttttttttttttttttttcttttttttcctttttttcccttcctattctctcctctctccttcccccccccccccaaaatctcacccccttttttttttccccaaaaaaatcccctcccccccccactcccaccactcccccccttccccccctcccccaccctcttctttttccccccaacacaacccaaacacccccccctctttcccccccccccctacccccccccccccttctccctgtgataacccttactccttttcccccccccccaccacccacctcgtacctacccttcccccccccctcccccccacccttccccctcttcctccctcatcatccccccccccccctccttcccccctcttcccaccccccccctccgcaccccccgcatccccctacacaaccccccccccctcccccccactccccctcccccccccccccctcctcaacccccccccccccc

SEQ ID NO: 39843 - DNA, 122 bp, Oryza sativa
  Clone ID: uC-osroM202020f01a1
cctcatacacactcacacaaacttttatcctcttgagaccccgccctctttttttttgtttttttaaaaaaaattggggttttaccttttttatttttcttacatactttttctttttctct

SEQ ID NO: 39844 - DNA, 419 bp, Oryza sativa
  Clone ID: uC-osroM202020f02a1
ccgccctcttttttttggtttttttaaattttttgggttttaaatttcttttttttttttttttctttccaaaaataatcatcacctttatccaattaaaattcccatttttaacctttctaacccagggcatccataaaaccccccctccttttattaaacaaattcaaaatactcaccaattgtttctagcctattaacttcataaggtaggggcacaataattggtccaaacactaaatactctgcttaaaaacacattaattgcaacataaaagcaatctaataaaaatttgtccccccctccatcaattccttcaaaaaggaaaacaaaccccaattatttccattccctaggagcccccaatgctccaaaatttaccaaaaactttttacctttttagcctttaacccattat

SEQ ID NO: 39845 - DNA, 457 bp, Oryza sativa
  Clone ID: uC-osroM202020f02b1
ctattcccccggtcgctccatcccaggggcgacgcgggtggcgattcaagccgcgccgccccctcccttcccctgctctccccagcctcgccgccgcccgaacagccgccggcaaagccgggagaaggcaaggaaggcagcggcggggctttccatctccctcgctcgtggtcaaggcggctggggcgccgatgagaccggacgacgggagtgaggcgacggcgacgatgtccagttccagcgctgccgagcacggatccggccctcccttggccggatctggtgctcccaccggcgggagtcgtgtgggacggtgggatccgccgccttcccggccggcagcgacgacgccgcggcctgccaaggagaggtaggggctggcgcgccctcgccggtgcggagacggcagccgtgacggtgtccgatgccatcatcgggacggtcagcaacggcggga

SEQ ID NO: 39846 - DNA, 448 bp, Oryza sativa
  Clone ID: uC-osroM202020f03a1
ttggtttttttaaaatttggggttttttttttttttaaaaaaaaggaagttttattaaaactcatttaaatacaccaagatgatacattccaactgataccacccccgctctttggataaaatgcacacagccaaaaaactggacaaagaatgcacactttatataaaacccttgcaagaagaaaaacaagagaaataagaggatgaaaagtttatacaagcccctctagcaacaccaaatgcaaatggcatgggttaaaacagccataacaaggggaaagaccacataagcttgttgaaacaagaattcaggcaagaataaaggccactctacccttttggatatcccttgcactccttttggccttcttttccccaaggatggttatactttgtaactgtaagaagtacctattccatgacttaatgttgtccaaatttcttttta

SEQ ID NO: 39847 - DNA, 430 bp, Oryza sativa
  Clone ID: uC-osroM202020f03b1
ctgatgtactcctccattgatgcagtttgtgcactcaattgttaatcacgtcgtcgttgatgaatgtttaaccggaggatgatggggtgcagctgatatcatggcttgcttgattaccgaattatattgcggtgtttgtgtttgtcaattagattctgaatctgtactactgccgatcttatgatcaaaactatatattaagtttatgtactcttaatttgtgggctacttttacggggtcttcgtactgctggtcaaatagtcctatgaaatcgatcatgtcggcaatatcgtcgtcaattatcgtggtcgtggttgttaatgatgtcaaataagtctatgaaaacctggtcctcttggtgtttatgtaccactgatcgatccatcatttgatctctgtcatgttgagatggatcgtgtaagaatatca

SEQ ID NO: 39848 - DNA, 91 bp, Oryza sativa
  Clone ID: uC-osroM202020f04a1
tttggtttttttaaattatttgtttttttttattttattttttttttttttttttttttttttttttttctaattgaatgtccttttcgga

SEQ ID NO: 39849 - DNA, 367 bp, Oryza sativa
  Clone ID: uC-osroM202020f05a1
tttggtttttttaatattttgggttttttttttttttttttttttttttttttttttttcttaccacattattaacatttttagattataatttctgaaaaaaacataagggggggccaaagtccacttcatttaaacaataaaacccattattacattataaagggcacctccccatgcaaaaaaaaaataaacaaagttaacaacaaaaaaacactttttaaaacttcccaaaaaaattgacctcaagtggagaaaaacaaaccaggaaataggtgaccatggaaaaacaaaaggaagtccttatggggaaagccaaaaaaaccccccattttttgggaaaaaaagccccaatccccaaattaag

SEQ ID NO: 39850 - DNA, 489 bp, Oryza sativa
  Clone ID: uC-osroM202020f06a1
tttgttttttttagggatgggggcaaaagtagattatattaattaagcctggcacgcatgaggagatggcacacgagaacaaaattgagatcaccatgatgatagatgatccatccaagctagctagggatccatccaacattgatcgacacacgcacacactgacaacgacgacgacggttttatttaggcgtcagagcaaaaggcaaggcctgcctacatataagctgggtactaatgcaagcaaattaaggcctcgatcaaagctctgatcgacagtagcagcatccatacgataaatcctcatgcagccgggcgacgaccactatagattcagttgcaggagcagcaggagcagccgctgcagctggtgccacacttgcaggtgttgcagccgcagccgccgttctcgccgctctccaccgccatcttcattcctccagagctcgccttgttggatggagcaacgaggaccaaggtcttggtggt

SEQ ID NO: 39851 - DNA, 462 bp, Oryza sativa
  Clone ID: uC-osroM202020f07a1
tggttttttagagaaaaaagggttataaatatagcatgttttatacatactcatacgtatgcacgtcacatcctaatcaacatcagctaggtaaattaaccttgccaagccatttagatacaattatcagataatactaggttttatacaatttttgcaggtacaccaatgctctcgtacaaaatcaaggcgtagggtaggggcacagtaattgatatacacactaaatactctgcttaattacacactaattgcaaattaagtggtaattaatcactcaaagctaaggcagtgagcatgtaatcgcttcagctggacgagctctggagcttggacacgaagctggaggcggcgaaggcggtggagccaccgacgacgcaggcgagcgcgaccacggcctggacggcgacctcccatgggtactcctccgggacgaggtagacgacggcggggccggcggcg

SEQ ID NO: 39852 - DNA, 330 bp, Oryza sativa
  Clone ID: uC-osroM202020f08a1
tggtttttttaattttttttgtttttttttttttttttttttttttttttttttggaaacaactttaaaatttttgacccaaaacaggaaattttttacaagcagggattgaaaccaaaacacccatttccgcaattggttttttttagctaaaaaaagggctgacatattggacaacccggaaatccaaatgaaacaaacctttccggtttgaaaaggcaaaccgggggatgagcaaaaaaaagctcccaaaaaaatttttgttcccaaactgactttggttccctaaaaaatttcggcgacaatttaatttgtccatgagggaaaccc

SEQ ID NO: 39853 - DNA, 314 bp, Oryza sativa
  Clone ID: uC-osroM202020f08b1
tgtactcctttcttccttcgaggaggaggagctatatatagacggggatggttcatctagcctcctcaccggttttgatttgatctgtgtgatttgagtgagtgagtgagattctttggaggagggattttggtttggtttggtttggtggtttgtgcgggattttgtggggaggagagctatgactcacctctagtccgcgatctttatgaccaaaactgttttacattgtttacgtcttcatcacttcgggggcttcatataactgttttcatttgtccttcttcttttctttctcctatgaaatctttcat

SEQ ID NO: 39854 - DNA, 377 bp, Oryza sativa
  Clone ID: uC-osroM202020f09a1
tggttttgagcaaattggggacatatttaggttcaaatccaacttattcataaagcatactgctgtcccacaggaaactgtttcataaaactaacatatcatacggactcgatggtccattaaaccagacacaagtagacatcagcaccacaaatacttgacgaacagaggctcgggatgaccaggcacatcggcagctccaccaaactggctgattactgaccaccacggaggcggagcaccaggtggagggtggactccttctggatgttgtagtcggcgagggtgcgtccatcctccagctgcttgccagcgaagatcagacccctgttggctgggggaatccccttcttggcctggatcttggcctttacatt

SEQ ID NO: 39855 - DNA, 409 bp, Oryza sativa
  Clone ID: uC-osroM202020f09b1
gaaagaaaaaaaaaagaagctaaaatggattcagataactaagctcttaacttcctacaaagtttcttgattgtagcaggaaactggaggttaagaagcttatatttacaacacaaatacctaagataccaaagatacatgccacacaagaaattcagtggcctacaatttccacaccctaaatgcgaaggcctacataccacacaccctaagcattccagattagaaacccaaacttcaccaaatcaaactgaactgtaacaatttagttcagcatttcttcatatgctgatgagatcaggtggcggtgaagatggtgagtttagctgctgctgctgctgctctttggcttcattggcctctgcagattcagctggcactacaagatcagacacagcaccttcaccac

SEQ ID NO: 39856 - DNA, 455 bp, Oryza sativa
  unsure (1)..(455): unsure at all n locations
  Clone ID: uC-osroM202020f10a1
ttggttttttttttcaactaggtttttttattggataggaagtactgtacaattacatgtatatttacaaattgaaggtgctttacagatgccagctgatcaattacaccctcttctctgcatattcattgtcacaggttatggtcagttctgtacatcaaccaaaaaccttatgatcagctgaaagcctatgcagaggcttgcagtgtcctaaattaacagcctggcttcagagaatacatgagcgcctaaccatcacttctttttggagccagtgcgattgaaggtgtgggctctttcccattgcgcaacgtcttcaacccgcgacggtggtggtggtaggacgtcncgctctaccatattccagccttttaaaatgttgtctggaactccaccatgcttcgtcggtttaccgctatacaggaagctcgtgttggagttcaacaggaggttgt

SEQ ID NO: 39857 - DNA, 430 bp, Oryza sativa
  Clone ID: uC-osroM202020f11a1
tggttttgataagatttagggagtggtgtactgtatttcccgggtttggtttggttacataacatgtgcttaagttgctgtcctgcaagcttctttttgaaacataaggcggaacttcgttccacttttatatttagaagaagagaattgacccagtttataaggataaccggacccgaaaaccatacatccgcatggttaattacaggaaaaccggctaaaacccaccgctacactactaaccatgatggcggagcccaaatgcaggacgtcgtcgccaagctaaacacaaaagccacccaacagctcccacaccgcagaagaggtgttatcgttgccgagctagccgcccaagcgacccagcagcgccgacttcacaaccacagcgacactaaagccatgaaagtcgccaaagcaaaaagcagtttcg

SEQ ID NO: 39858 - DNA, 414 bp, Oryza sativa
  Clone ID: uC-osroM202020f12a1
tggtttttttttttttttgggttttttttttttttttttttttttacacgtacgcacagatcgggtacatactgaagaaaattaagatagaacatgcccacagggggggggcaacataaagtatacagctgatacaaagagagaggggagcgctgcatgtttgccgcagctgttattttaattactttggtaatatatgctggagcaaggacgtgcttaattactagctgatcaactccgattgggctagcatgttaagctcgatcgatcgatccaagcaggattgatttaactgaccttgttgcagtcgggggagaggctgatggggaagccaacgttgacgccccacttgccggggaccccggggacggggcccagggtgagcgacttgatgctgccggggaggcttttgag

SEQ ID NO: 39859 - DNA, 438 bp, Oryza sativa
  Clone ID: uC-osroM202020g01a1
ttgtgtttttttatgatccggggacttcaattaacatacacacagaatgcattaccgcacatgatcaatcttaatctcctcatcctacatgtcatgtctcatctactgtaacccccatatactatctcagagtacatttttttcacttgtgatgactgtcgccgtcctcgagcggcaggtcgggcatgaccttcttccagaaccagtgcttcctccataggagcaccatctcctcgatgggcacgcccttggtctccggcaggaagacgtcgacgaagaccgccatcacggggatccacccggccaagaacaggaagatgcccaacttgagccctcataccaacgacaggaactccttgccgatgaccaaggtgaagaacaggttcaccgccaccgtgatgctttgccccgccgacctcgtctccagcgggaagatct

SEQ ID NO: 39860 - DNA, 444 bp, Oryza sativa
  Clone ID: uC-osroM202020g02a1
tttgtttttatgaatgtgacgggactctcactgtcccaaaattttatagatgcatttacaaagttacaatactcattacatgcaaataactgaaggatggcgaatgtatttgtctggtatctacctgctctcctaactagcgtgccatctctcctagatggtaaccattggatcaggttatacttcttattgaccattgttctcatactatgctgtccaagctgccgttgccgtcgtcgatgcctttggtgtccgaaagctgcttccggcggctgccacccctgatcggcagaaacggcgcgccgtcgccgtcgtactacgccacctttccgtccacggtgttctggagcgcctgctcgcacctcaccagaatctgcagaacgtccctcattgtcggccttgtagccggatgcgcgccggtgcagatgatgccgagcttgaaca

SEQ ID NO: 39861 - DNA, 410 bp, Oryza sativa
  Clone ID: uC-osroM202020g03a1
ttgggttgatataaacgctagggaataaacttaggacaaaagtagaaagcttaacatataccacacatcttgccgagctcaccctcacagcattgttgttcgaaatagggacggacaaacaacacaggttcagctagaaattcctaaaaacagttgagttcatggtgtagctatagatgatcacattggattttgggtgttcattcatgcctcgggaaatatttaacttaagctgcggaagacatctcaaagtgattgcctagtctaatcccagccttgagcagctggttgagctgccgggtcccatccagtaggcgcaaccggtggaacgacggcggctttagtggctacgggtgctcctgcttgatcccatccttcggcaggagcaactggagctggagctgcgcccc

SEQ ID NO: 39862 - DNA, 425 bp, Oryza sativa
  Clone ID: uC-osroM202020g04a1
tttgggtttttttttttttggggtttaagacacaaggttgtaagtaacattagatgaatgaagatgtacatttttcatgtttttggacagatatgcttagattctgccttttacggatacatccatgctattttgcaagccatgtaactgatttataattaatgcagcctttccggtggttccatgacgatcatcgcattactcgttatcatcatcagccaggtcgaactgcttgagcagcgcgccgtaaatgggcagtgggatgtccttgaggtagccgagtgggttggctaagcgcaggttgtcacagatgccgacatttctggtgagcaaaacacgggcacgatcccttttggcctcgatttcagagcaatttgcaagggggctgtggaccaggacaaccttgcagatgtcctcctcatggc

SEQ ID NO: 39863 - DNA, 468 bp, Oryza sativa
  Clone ID: uC-osroM202020g05a1
ttgggtttttttaataagggggggatccaacttattcataaagcatactgctgtcccacaggaaactgtttcttaaaactaacatatcatacggactcgatcggtccattaaaccagacacaagtagacatcaacaccacaaatacttgacgaacagaggctcgggatgaccaggcacatcgggagctccaccaaactggctgattactgaccaccacggaggccgagcacctagtggagggtggactccttctggatgttgcagtcgggcagggtccctccatcctccatttgcttgccagccaagatcaaacgctcctggtatgggggaatcccctccttgttctggatcttggacttcacattatcaatggtgttggagctcttaacctccaaagtgatggtcttcccagtcaaggggttcacgaagatctgaataccaccactgagacgaatcacccgtgggag

SEQ ID NO: 39864 - DNA, 132 bp, Oryza sativa
  Clone ID: uC-osroM202020g06a1
aaaacttgggggttaattttacataccaatgccaacttttcgccattaaccttaatttaattttcataaaaaactgagaatggcccaccctttcatattcgtcgcatacataacccacacttttatctttac

SEQ ID NO: 39865 - DNA, 399 bp, Oryza sativa
  Clone ID: uC-osroM202020g06b1
tgatatgcagctcaaccactagcagcagcggctggaaggcgagaggaggaatcggaggtagctggacggcggcgaggcgacgacgagccggggtggtgcagcaagaacggcgcggcgagcggcggggaggagagattggatcgacgccgggtagttaggaagggagcttggagagatggcggcttccgcgaggcccgtcggcgtctgcggggagagggcgacgagcttcgccatggcgtgcagtctgctcagccgttacgtccgccagaacggcgccgccgacgtcgagctcggcctcggcatcagaggtgagggtgaggctccgagggcggcgccggcgacgatgagcttgctggccggtgaggccgacaggaagaaagataccatggagctgttccc

SEQ ID NO: 39866 - DNA, 422 bp, Oryza sativa
  Clone ID: uC-osroM202020g07a1
tggtttttttatgcacgggagaaatttatacaggtgcattgcccatgtacacaggaaaacacgacaaaagacctaaaattccagtgcgtcgttgaacccggcgtcgtaggcggcgtcagcctccatgtcgccgaccatttccccgagcatcatcccgccgaccgcgccgccgaggagcccgagtccgaggcccatgcccattcgtccacctttcctcgccgccggctgttgtgccgccgcgtagctgtacgtcgccggcggcggtgggccggcgttgtacgcgtacgggggctgacccgcgtaaccgtactggctgttgatgcggggggtcccttcctccgtacggcgcgccgtacggcacgaccggcgggtgcgctaccacggcgttcgacggcggcgggtaggcggtgaccggcgacgac

SEQ ID NO: 39867 - DNA, 451 bp, Oryza sativa
  unsure (1)..(451): unsure at all n locations
  Clone ID: uC-osroM202020g07b1
ttcttattgagtagaccctatgcatttggttgtgttctaaggttgagaacatcttcagattttgaacctggcaattcttatggccatttcttccctgatcctcaatatgaacatgtgcaacatatcatctgctgcgattcatttgctacttatgcatatgactttaacttttcacaccctgagggcttttccaggcacacagatcctgctgttgtacaaattgcatttcagtatagtgttattgaacctgtcaagcatacatcagagaatgaaacacaatcatctacaagtaacatgttttgtctaaagaggcggttgagaataaggacattgcagtatcgaccagctaaaaatatcaacgaaatatatgacagtgttgatccagagactctnctacatattctagtacataaggttattttaatttcattggataaggagttaaagaggg

SEQ ID NO: 39868 - DNA, 430 bp, Oryza sativa
  Clone ID: uC-osroM202020g08a1
ttgtttttttagagaatggggcaattcattattacaaggttacaacatcattacaacaactcagttcattggtggcgcacatctgctagtacgcgctacttccatagaacaacacaagagttacagatatcgatatagagttatatacaggatgaactagatgatgatgagcgaggcttcaaggataccgtcagttgattaaaaaaattgggaatgacctgaggttttttagccatagcacatgatgagttgagaaaatctaatttgcataggcaacagttctctgctaataccttcttacgccaggttcactggtcattggaaacttcaactttgcatatgttctttaccaccaggtttgaaccagaaggtttttaaccaaaggggttgagaactaaaaccatagctatgtaatgctatcgatgctggt

SEQ ID NO: 39869 - DNA, 430 bp, Oryza sativa
  Clone ID: uC-osroM202020g09a1
tggttttttaaaattttttggttttaaatttttttttttttttttttttttaacatatactttttttcttttttttctcaccctcatatttttttttttccaaataggtttcacaaaaaaaaaaaaggctctttaaaaaactcctaaaaaccgcaaaaaaaaccaaaaagcaacattttaacccccttttttctgggaaaaaaaatctaagggggaaaaaaacaaaaaaccctaaactaaaaaacctcccccccctttaaaaaaatattcaaacaaaaaaaacttgccaaaccccatcacccaaattgtaaaaaaaaaaccttttattttccaccacataaaagccccggagggattaactgggggaaagaaacaacccttttttttaaaaaaaaatccggacctgtaaccacactccattctccaaaaa

SEQ ID NO: 39870 - DNA, 461 bp, Oryza sativa
  Clone ID: uC-osroM202020g09b1
tgtaacccaagaggttatactgttcttcacattgctgcgaggcgaagagagcctaaaatcattgtctcccttttaaccaagggggctcggccagcagatgttacattcgatgggagaaaagcggttcaaatctcaaaaagactaacaaaacaaggggattactttggggttaccgaagaaggaaaaccttctccaaaagataggttatgtattgaaatactggagcaagctgaaagaagggacccacaactcggagaagcatcagtttctcttgcaatggcaggtgagagtctacgaggaaggttgctgtatcttgaaaaccgagttgctttggcgaggattatgtttccgatggaagcaagagtagcaatggatattgctcaagtggatggaactttggaatttaacctgggttcttgtgcaaatccaccttcttgaagacaacggacaactgttgatct

SEQ ID NO: 39871 - DNA, 439 bp, Oryza sativa
  Clone ID: uC-osroM202020g10a1
gatagggtaaccgtgagacggcatcctgaaatgccgtaaattaaattggagctaacaatgtaatttacatttgatctttctgctctacagctacaacaacatgcagaggcacaggctgcagcagtcacatacaatgctgtagacttgatacatgttcagttaacgcccgtttacagaagcaatctgtgcatccgtgccttacagtaagtttcacaattgtgtcccaagctaccaaattttgtcaccccatgttccaatcctttgtgtatacaacttgagtggaggaaatgggtggcgttttcgtcaggtttcagaatacagaatgagcaattggagagcatcaatttggcaacttgatgaataacaacaggggaataataatctttggccttgctactcaagaatgtctgttggccacaactgtctccaatttgagaac

SEQ ID NO: 39872 - DNA, 480 bp, Oryza sativa
  Clone ID: uC-osroM202020g11a1
tggtttttatctcacatcgggggtcttatttagatgcaacatactaattccacaacaccttatcgaagcctaccatactgcatcacatatatcagcaaccataccgtatatacacatcataaccttaccaaatcaggtcacatgcagagtcatcttcacatcataagttcaatactaaccaaaattacacaataccaagtttccaatgatgctatgcataacaataaagctgctaacgatagtaattacggataattggaccctcaggccccgccaacttcttccacacaggcggacacagcatggaaggcacggacacgggttccacagcccgatcgcttcttacgcttgcctgaaatcatcgtccacattggctccggagcaagcacctggacctcacagctactggcctcctccttgacccgaccgccacagctctcaccttcctccttcacccgtggaagaagggtcggcttagct

SEQ ID NO: 39873 - DNA, 483 bp, Oryza sativa
  Clone ID: uC-osroM202020g12a1
ttgttttttttttccaggggacctaatttcacataccaaaagaaactgagggcaaatatagtttactttatgttcataaaaaactgataatggacctggcagcggatacgatgatttcagcaaccacacttcatgtgaagctaaacaggaccaagtagcaagagactggcatatgataccaatatcagtacaacacattaccaggttaaataagcaagcaaacagccacacgccgatttccattcatctgttttgtatgccaagcttaaactgaggacaatgagcagccctgaactggaggggatcatcgcatcgatcttcaacaccgccagaagcaaggacaaagcttgaggaggctgtgaattatggagcagtgacttgttggtgagatctgtaaacgggaggtgccgggctatcaatttagcttgctaacgttaacttcctgcttaccaaaatcattcaacattgtcgttagcctgaatt

SEQ ID NO: 39874 - DNA, 380 bp, Oryza sativa
  Clone ID: uC-osroM202020h01a1
ttggggtgaactgaaagcgggaaataatttaatatcaaaattttctgatcgagaattgaagactcgatcatgggcccaggtaggagagcagacaccatagaccgatagactttctgctcactccacaaacctagctctattttttaaatttaaaatacatttttttccgtcccctgtgtgcataggtagctagacaacggaagaattccatgcaggcttagtcgacttggatctctgatttgtagagagcgttggccttccaattatcggggatgacgtcgttggcgacaagcttctggtcagactcggtggtgacacggagggagaaggggcccttgagtggcttgggagtgtctattctccagatagcaccccatgac

SEQ ID NO: 39875 - DNA, 441 bp, Oryza sativa
  Clone ID: uC-osroM202020h02a1
ttgtgtttttttaattttttgggtttgacagccaaaaatgaggagatatattaattacggggtatcgtttcaaggatgagttccgatgagtgatcgatcactctccacatacttggatcggtctctttcgcacacttacaacgacaaggggagacggtacaacagcatcggcaacaaacacgcacgtacacgggtagtactacagaacgcgccaacgtcatgggcgattggtgagaaaacacgcacacctactagtactagctttattcttttttaggggacaccacaaggccctgaaccaatttatcggctagcgcgatcaatggccgtccggccggacagcttcgaacgctatgcttacattttccccgtggctgtcccgttggccacaaccaggccgaccccgttcgtccccgtgggcggcattgtgcaattgccctt

SEQ ID NO: 39876 - DNA, 358 bp, Oryza sativa
  Clone ID: uC-osroM202020h03a1
ccaatatatctcataaatttatcacttgaaaatttttaccctactaaaaaccttcatatcatactccccataaacaaccctcaaacaatttccaaccctaacatacccatcacatacttcatacccagctctgatgccaaaacaacctgcacccaaaaactgaacataattaaaaatggaagcaaaaaacaaattaaatgtacatttataccaaaaacaacaggtgaggtgaacatttttctgaaaccaaaaaatgatatccatacaagtcattcaatgttcttgagcaatttcccttttcccaaagtgctcatattgttcacaatttttctccaacgtccttcagggcaaaaatcaa

SEQ ID NO: 39877 - DNA, 68 bp, Oryza sativa
  Clone ID: uC-osroM202020h04a1
tttggttttttaaattttttgggtttttttttttttttttttttttttttttttttttttcggccccc

SEQ ID NO: 39878 - DNA, 424 bp, Oryza sativa
  Clone ID: uC-osroM202020h04b1
catcagtgaccaagaaccctggtgatgaggtcttctctggctcgacctgcaagcagggtgagattgaggccgtggtcattgccactggagtgcacaccttcttcggcaaggcggcgcattttgtctacagtaccaaccaagttggtcacttccagacggtgctcactgcgatcgggaacttctgtatctgctcgattgcggttggtatcgcgatcgagatcatcgttaagttcccgatccagcaccgtgcctaccgcagtggcattgagaacctgttggtcctcttgatcggtggtatcccaattgccatgcctaccgtgctcttggtcaccatggccattggttcccacaagttgtcccaacaaggtgctatcaccaagaggaagactgccatctatgatatggctgtcatggatgttctgtg

SEQ ID NO: 39879 - DNA, 488 bp, Oryza sativa
  Clone ID: uC-osroM202020h05a1
ttttgtttttttatttttgggggaagaacagaactgatgatgtttcagctagtaatcggtgttcccgacagaaactacaagctcttttttcagtgcccctgaaaaaactagtactactcagcctacaagaactactccccactcaccaatctctctctctctcgctctctctcacctcccctctaatacttagcagctagcttagccttaataatgtaccgcagacttgtcgatatccgtccagcgctcacttgcaatttgtaaggaatgaagccatgtgcattcctgatcatcaatctctttatttttcatattcgcgagactccaccagcacataaactggtttgccattgagcttgtagaaatccttaaattttgggagcccaatgagacacgcgcactcaacaacgtcagctccagcgcgttcaagaagccttatagcagcacaaagtgtcccaccagttgcaaccagatcatcaacgatcagc

SEQ ID NO: 39880 - DNA, 392 bp, Oryza sativa
  Clone ID: uC-osroM202020h05b1
ttactatatcgccctgtggaagttcgagaccaccaagtactactgcacggtcatcgatgcccctggtcaccgtgacttcatcaagaacatgatcacgggtacctcccaggctgactgtgccgtgctcatcattgactccaccactggtggttttgaggctggtatctccaaggatggccagacccgtgagcacgctcttcttgctttcactcttggagtgaagcagatgatctgctgctgcaacaagatggatgccaccactcccaagtactccaaggcccgttacgatgaaatcgtgaaggaagtctcatcctacctgaagaaggtcggctacaaccctgacaagattcccttcgttcccatctttggggttgagggtgacaacatgattg

SEQ ID NO: 39881 - DNA, 453 bp, Oryza sativa
  Clone ID: uC-osroM202020h06a1
ttgggttaggaataacaactgggtaattaattaaaagacattagtagagcaaaagaagggcgctgattaggacatgaaagcatggtaattaacggcctagtcaaacactaacacggtaaaacctctccctctctcatctgatcatctcatggacaattagaagcgacgacgctgcagctgctgctctcttctccctcctcccccgcgtcgccgccgtccgtcacgcaggacgacggcgaggacggcatgtcgtcgtcgtcggcggcggcggctcgccggcgtggcgcgccacggatggacggcggcgaacggcggtgagccagcgtggtggtcttcttgaatacgcggcagaccacccagacgtcgttggcctccggcggatggtcgtcggcggggaggaggcggtactcgtgcatggcccaatcggtgcgggcgccgccccggcggaagaag

SEQ ID NO: 39882 - DNA, 364 bp, Oryza sativa
  Clone ID: uC-osroM202020h07a1
gtgttttttaatttgggggggataacgacgaatcttgtattagttgctgatgtttgcaacttaaaaactagaactctttactagtaataatgttaataatgaacattacataactgaaaaaaacatgaagcgcatgcatcagatcacctaaacttattctatttaagcagcaactgggatctcagctgtaagaggctttgaaaactcatcctcatccttaggggcatggatggtaacaagatccggtaaaggagtcattggtccttgcttgcccttcggatcccaatcaagcataaccttgaccttaatacccaccacaccttgtctcagaagaacatgtctaacagcagagtcaatatacaag

SEQ ID NO: 39883 - DNA, 438 bp, Oryza sativa
  Clone ID: uC-osroM202020h07b1
aatcgtcaacaaggacattttttctttcttcctttatttcttacaatctatgggcaaatggtttgccaatgtaacactactctctggagctaaaaaactttcatgaaggtatccaaggtagatcaaaatgttgaggttgcaccaaattattaatctaatgctgcgctgcatgtcccactttctggaaaccatttgcaggccctccaaatggaattaaaatgaagagattagacataagcaagtaagaagctacatgagaaattctacccaatcttcagctcagcctaaaatgccagagaaggcagaaattacccatcgagcacaatcactaaacaagctcagaagaatttgcctcttttatccttccttttggtcaagatgtacagtcgataatgtaatagccctggtatgtcaacagcccatcacagcacaattgtc

SEQ ID NO: 39884 - DNA, 437 bp, Oryza sativa
  Clone ID: uC-osroM202020h08a1
aaggcgaaatctgatcaaacattgattactcaagatcgatcacatcaagagtacacttctacaagttcactagacggccacaattctgatcatagacacgaattgcataatcgaatcaatttgcagtccttttatttccatcacatagttcatagccagctctgatgccatccaagcggcagccaagaactgaacatgatgatcaatggatggcaacttcaacttcagtctgcgtgtctttcattctcagggctttagcatgtccctgaaccagtaggccgaccccttgggggggcgcttgagcgtgttgaagtcgacgtaaaccaagccaaacttggacgtgtaacctgacagccccttcaagttgtccaggagagaccaggcgaagtagccagccacattggcgcccttgtcgatggccttcttcagctggggga

SEQ ID NO: 39885 - DNA, 467 bp, Oryza sativa
  Clone ID: uC-osroM202020h08b1
ttttcttccctgctcaagaagctcaaagactgcgtcgtcactgaagatcatgccaacgatgccctcaccactaggtctgcctccattaagcataggtctcctatcatcccagacgagtttaggtgccccatatccctcgagctcatgcaggaccctgtcattgtgtccagcggccagacatatgagcgatcctgcatccaaaagtggcttgattctggccacaagacctgccctaagacgcagcagccactctcgcatacttctctcaccccaaactttgtcctcaaaagcctcatctcacaatggtgcgaagctaatggtattgagcttcccaagaacaaacagaattcccgtgataagaaggcggcaaaaagttccgactatgaccaatgctggtctagtctcgctgatgaacaggctcaggagtgggaaccaagatgaggcagcggcagcttgcaggtgagata

SEQ ID NO: 39886 - DNA, 430 bp, Oryza sativa
  Clone ID: uC-osroM202020h09a1
gtgtttttttaattttttggtttttttttttttactcggggaggggaattatactatccattagatttcacatctttattcctggaaattctaggcccggttcaaaattggcatactatcctggccataacgaaccctgcaagcttaacaaaaacaaactgtacagggcagctcaagctcccagttgagaagagatgaacacatttggaaccaaattttccaaatgtttaaatagaaacaagaaacaaatgtaatgtacatttatacgaaaaacagcaggtgaggggatcatttttctgaaaccaaaaaatgatatccatacaagtcattcagtgttcttgagcagtttccgttttcccaaggggctcatattggtcacaatttgctccagcgtccttcagggcagtaatcaaccggggcataatttttg

SEQ ID NO: 39887 - DNA, 363 bp, Oryza sativa
  Clone ID: uC-osroM202020h09b1
aatcgtcaacaaggacattttttctttcttcctttatttcttacaatctatgggcaaatggtttgccaatgtaacactactctctggagctaaaaaactttcatgaaggtatccaaggtagatcaaaatgttgaggttgcaccaaattattaatctaatgctgcgctgcatgtcccactttctggaaaccatttgcaggccctccaaatggaattaaaatgaagagattagacataagcaagtaagaagctacatgagaaattttacccaatcttcagctcagcctaaaatgccagagaaggcagaaattacccattgagcacaatcactaaacaagctcaaaagaatttgcctcttttatcc

SEQ ID NO: 39888 - DNA, 478 bp, Oryza sativa
  Clone ID: uC-osroM202020h10a1
tggttttagtatcaaagggggacagctgctgttccgatataaaaaatattggtaaatcgttctacatcaaaacaggcctgtcttttacataccagagggctacctgctagtctatagtcacaaccactcccgcttcgtttttaataacacatctgtacttcacatttcatcccaacaactaacctatttgggctggatacatcgcaaaagatgggtcgttcgacccttctaccagctatgaagtaaagctccaattctatccgatacttgtactcttatacaagctggatcctaatgcactcccagcatacggctgtttcttttgtgaagtgaacaacaagttggcggcggcgatgatctttggacccattatgatggggggcttattgatggtctgatcctcgcaggcatggtaaggccagtgtcactatttgccataatttgatgaaagaaagagcggttcggcgttatggacatc

SEQ ID NO: 39889 - DNA, 260 bp, Oryza sativa
  Clone ID: uC-osroM202020h10b1
atggtacctaaaatgaacggttttgtggttgggggtgattttgtaacccgattacaagttgatggaccttgggtgtacttttcctaggctaactaactaggcttgtgtagggacaaggctttggcccaaaaaaaaaaggaataagttcaccggaggtcccttaacttaacagcgagattattttgagatccctcaactataaaactagaaatgttcacccctaaactcactcaaaccgttcactggaggtcccataaatg

SEQ ID NO: 39890 - DNA, 329 bp, Oryza sativa
  Clone ID: uC-osroM202020h11a1
ggggcgcttaaatcaaaacaaaaagcttttttttaaaaaggggaaaaaaaaaaccccccttttttttaaaaaaaattttgttaaaaaaaaaaaaaaatttccccctaccggaaggtttcccaattttccccaatataaaaacccctttttttgggtttgtttaaaaaaaacccccacccttttaaaaaaaaaaagaaaaaaaattcccaatctttcccttggaaaaactttttcccccaaaaccccttccccctaactaaaaaaattcttttttccccctttccccaaaattttttcccccccccccggggcgcccccctgggcccccc

SEQ ID NO: 39891 - DNA, 368 bp, Oryza sativa
  Clone ID: uC-osroM202020h11b1
tctagtcgcaaagtctgcaatccgaacgatgcgggggcgcgggatgcatgcggactcactgccgcgcgctcccgccatgcagcaggggagtcgtagcagcagcagcatactggaggagggtatgactggcgcggagggaggatggtgtcttgtgcggcaatggcaaccctgccggactccgcgggcggaggcagcggtggccgggcggactccgagctgatggtgccgcagttgcacctaaaggcgctgcaagccatcctcgccgagcgcgcgccgtggtcgatcgcgggcgcgcccgcgccggcggcgtttttccggaggcgggacaggtggttccacctgccgtataaagcgccgtcgtcaacgga

SEQ ID NO: 39892 - DNA, 292 bp, Oryza sativa
  Clone ID: uC-osroM202020h12a1
tggtttttttgaactgggggcaatattacttacgtgtaccaatatgttctttacagtattatggtacagagtaatttcacataaaacatcgatcaaaagtccaaggtattggctgtttcacttgcagatgggagagacactatgcaatggtgttatatatttcataattttatcatttcttctcttctttcttttcctctttcttctcctccttcttctcttccttcttctcttctttcttctcctctttcttttcttccctcgcggtacttgttcgctatcggtctctcgc

SEQ ID NO: 39893 - DNA, 386 bp, Oryza sativa
  Clone ID: uC-osroM202020h12b1
tagtttccccacctccgatccgacggttcggggggcctcttacgcaccgagaccgatcgccacctgcacggccgattgcgcaccgccaccgagtcctccgcggctgccaccacgtggtgaatacgggctcccaccagcccatcgcacggtggcctgcgtcggcgacagtttgagtcttttctgcccttgatcaccgagggacatctgcatctaggaaaaaaagacactgaactatggctgatagactcaatgtccgggggtatgctccccttcctacagaggacagggatcacagcagtgttactggtgatgtttgaccatccggtcaattacactccaaaatcctttatgaaaatcccgtggaaagcaattgccctggcattatt

SEQ ID NO: 39894 - DNA, 185 bp, Oryza sativa
  Clone ID: uC-osroM202021a01b1
ttttcctgagagcttcttaaaggtgaaaggggaaaaaaaagaaagaaaaagaaaaggagatgagatgggtgactcaagatgcatcaagcaaaggaagaacaatatgatgatgatgatgttgttgttgtagtggtggttgaggttggaaggtggatggtatgagggatgtatgtagacagctctgg

SEQ ID NO: 39895 - DNA, 479 bp, Oryza sativa
  Clone ID: uC-osroM202021a02b1
cttgtttcaaccaacaacagcacatcaacatggcaatgctgctgaagaaggccgctgtggcccctgccaggaccagcgtgcgcagcaaggctgccatcgagtggtacgggcccgaccgccccaagttcctgggcccattgagcgagggtgacacccccgtctacctgaccggcgagttgcccggtgactatggctgggacactgctggactgaccgctgacccccagaccttcgtcaagtaccgggagatcgaggtgatccacgcccgctgggccatgctcggcgctctgggctgcgtgacccccgagctgctggccaagaacggcgtgcccttcggtgaggccgtgtggttcaaggccggtgcccagatcttcaggacggtggcctgaactacctgggtaacgagaacctggtacacgcccagtccatcctggcaaccctggccatccacgtgctgctgatgggtgctgctgagagct

SEQ ID NO: 39896 - DNA, 552 bp, Oryza sativa
  Clone ID: uC-osroM202021a08b1
tattgacaaagcaagcatgtacagtagccatggcgaagcatctcgcgctgtccgtggccgtcgcggtggccgtgtcgtggctggcggcgtcgtcggcggcggcggcggggttctacgagaagttcgacgtggtgggcgccggcgaccacgtgagggtggtgagcgacgacgggaagacgcatcaggtggcgctgacgctggaccggagctccgggtccgggttcacctccaaggacacctacctgttcggcgagttcagcgtccagatgaagctcgtcggcggcaactccgccggcaccgtcaccttcttctacctcttctccggcgagggctacggccacgacgagatcgacatcgagttcatgggcatcctcagcggcaacccctacgtcatgaacaccaacgtctgggctaatggcgactgcaagaaggagcaccagttctacctctggttcgaccccaccgtcgacttccacacctacaagatcatctggaatccccaaacatcatattccaggtggacgatgtgccggtgaggacgttcaagagttc

SEQ ID NO: 39897 - DNA, 73 bp, Oryza sativa
  Clone ID: uC-osroM202021b02b1
accgcgcgcttatttaggcaagcaaggagagaagcgggtgggccaactgactaaggcaatccagacaatggcc

SEQ ID NO: 39898 - DNA, 525 bp, Oryza sativa
  Clone ID: uC-osroM202021b06b1
attatttggaagaagcaaagaccaagactaactcaagaactagaagcgttctggacgttagacaagccaattacgaggctggagttgggtatcacatctgatgctcatgcagaaaaactaagactgttgatagatctcttctaccagtgcactaaaggaattgcatctgagcgcccaaaagctgaggcggtttacaatttactgtgctctctacccacatgctatgacatgaggtgaaagtgtggatcttaaatcagtatgacataaggtgaaaatgtggatcttgaatcaggaacctgttgatgagacagccagccagatcggcctgcgccaggatggcaagttatgctgggtggttttagcaggtcaacagatctggcctcgcttggtttgaacttctgaccagcatgccgcttattctttgagtgctggcgatgcggaacacgagaaatccaaccaaaaccaaagcccgtggcagcattggtctgagttctctggagttcatcctgtgtcagttatgtagca

SEQ ID NO: 39899 - DNA, 604 bp, Oryza sativa
  Clone ID: uC-osroM202021b08b1
gcagctatggttacccagctcacctacctagctgcatcagcaggagtgtgcttggcttcagctctagccatcgccttgctgtccatcgccctctacatcatcggcgtcgtcgcctccttcgccgtcctctgcgccaaggagttcgccgagagagcccacgaccggccgccgctcgtcggaacagttttccggcagctcaagaacttcgacagaatgttcgatgaacatgtcaactatgcaaccgcgcatcgcaccagcaggattgtgtatcccggtcactgcgaggtctttacttctgatccggccgtcgttgagcatgtcctcaagaacagcttcagtaaatacagcaagggggacttcctcactacagccatgaaggatctctttggagatggaatttttgcaacagatggggatatgtggcgtcatcagaggaagctagcgagctacgaattctcaaccaaagtgttacgtgacttcagcagtgacacattcagaaggaatgctgcaaaactggcagagaagatctcatgtgcagcagctaacagaattagcataaatattcaggatcttttgatgagagcaactatggactcaatcttta

SEQ ID NO: 39900 - DNA, 543 bp, Oryza sativa
  Clone ID: uC-osroM202021b09b1
ctcgctttctcaggcaggacgcccttgcttggctttcgtgagggcttgaacctgtgtgcgggctgctgctgctagcttgcagaaaaaaaaaactctcatcttttgcaggaagagacatcactgtttctgcattcgtgtgcatttggattaagctttgcttatccctttttagtggagattgttgagtatatcaggtctatatattggcagctctggttggagatagacactcacactgagccaagatggggagtttgcacaagttcagtgttattctcctcatgttatgttttgctacgttggggagcgctcagtatgtcaagtataaggatccgaagcagcccgtctctgttcgtgtcaaggatctgctcggccggatgactctcgctgagaagattggccagatgacccaaatcgagagggagaatgccacggcggagcagattgccaagtacttcataggtagtgtactgagtggtggaggcagtgtgcctgctcttaagcatcagctcaggcttgggctcaatggtgaatgaaatgcaa

SEQ ID NO: 39901 - DNA, 559 bp, Oryza sativa
  Clone ID: uC-osroM202021c01b1
cacgactccacccacctttttatgccctccaaaccctagcccataacccctcccgcctcgctgccatgccagatctgagcaccgtctgcctccccctctcgccgcaacccccctccaccgccgccgccgccggcggggagctagcaggcgagcagcccgccgccgtcgccgtcaccaccgccgcggcggcggtgtctgcgtcggcagaggcggaggcggcgggggaagcagaatccgcctccggtggcgacggcgcgcccgttctcccggtggaatgccgatggagcggccgagttcgcagcttcgcgggcgctggcgagggcgcgggcgcggccgctgtccccgcgtgccccgccccgcgccgcgggggcgggaaaaagccgtcctccgcgccgtcgccttcgtccacggtggcgaccgcgccggctcattcatcgggtcggccgttcgaggagtacgttaaggagtggaaggcgaagaaggcggcgctcggcgtgccggtcggacgctgcgagctgccttttctaaccggcacgcctaagcgggtgaatgtcattat

SEQ ID NO: 39902 - DNA, 493 bp, Oryza sativa
  Clone ID: uC-osroM202021c02b1
accttgtaattactaattgtttatgtagcaagacacatgtacattagccgtatactcaggcaactgtagcgtacaatgaagcaaacctcatatacaacaaacctttacatcaaagtagacgagatttgtttgtttattcaaaggtactcctatataaaccttactccaataaaaacggaaagtagtatgcatgatagatcctttttacctactaataattgaagtggcatgaatagtttactcggcagcaaccaaccaaccagggagattgattgattgattaatcagcaggcatgataagatgagaaattaagtcgtagtaataatcttgacagcgtccaagatgttcttgccctggagcttgctggagacgacgagcctgacgtaatcctccacgctgatgctccggtagcgcgccttggcgacttccaccatcttcttcagtggtccgtacgtcgacccgaacgtggcgttgtggaacgccgtcacggac

SEQ ID NO: 39903 - DNA, 375 bp, Oryza sativa
  Clone ID: uC-osroM202021c03b1
gttttcaacaacgtaatggctcacagcttacctcttgatgtatggggttggatcaccaacctgcctccgttctcccaatggcgctccaacgccatgtccctttgcatctgccccacaccatcagcatcagaatcatcacagccatcggtgaacctatcagttgtcaaaacccctcccacccagccctcctttgtcaccttctccatctttgcaaattaccgtgtgccaatttctctgtggacgtcaaaaccagtccacctgaaatcatacacccagcagtttttagacgaacaagagatgttagagttgtttgttgacattgtggactgggtgctgagatccggaccaaacaaaaagctgttctttcagtttccc

SEQ ID NO: 39904 - DNA, 451 bp, Oryza sativa
  Clone ID: uC-osroM202021c06b1
cttgctctctcctcctccgccgccgcgccgatcgatcaggagtagcaatggccaggttctccgcagccgccgtgatcgccttcgccgtggtggccgcggccgcgctggccaccgtggcgtccgccgccgacgcgccggcacccgccccgacctacggcgcggtggcggccgtctcggcgcctctctccgtgtgctgcgtcgccggcctcctcctcgccttgctccgccactgaagcgttcttcttcctctgaatgcttttgcttcagatctagcagtacagtggtcgtgcgagtcttacttagcatttagtattagagcttagtagcgatgatgacgtgtgcgtgtggaggcattgatttttggttggatctatggggttatacgggttggtttggagtgaggaggatttgagaggggattattagtatctgttagaccggtactactact

SEQ ID NO: 39905 - DNA, 466 bp, Oryza sativa
  Clone ID: uC-osroM202021c08b1
agatcgttgtgcggtgcctcgacgagacgacgatatttccccttcccctcgtcgtcgcctccgactccgactccgactcctcgtgagctcgccccgccgcctgcgccgccgatcccgcgaggcgcgccgccgccgttcgtcctgctgcttccgccgcatcccgataccgtgggagcactgaagaaaactgagaaatggatgtttttcagcgattctactgtttcgtaaagcaaccctactgttagtgttggttgtttgaagatgattgaggggtcaaggtttcagaatatggtgggcgggtgctggaaatgggagggggtataagttgcagaggaagggaagaaaacgagatgaatggctttcacaatatgccctactaccaccagggtggggagaggctccacatgtccgtggataacgcccacaacctgaacatgatgaaccttgttggtggttcgggttgcca

SEQ ID NO: 39906 - DNA, 596 bp, Oryza sativa
  Clone ID: uC-osroM202021c09b1
cttcttccagaacttcgtgctcaagaacggcgaccagccggagtacatccacccgtactcggtccgctccgccgccgccgcgctcaccctgtgctacccggcgcggaaccactccccgtcgttcgtcatccagacgttcgtcgaggacctgaccgtctccgcggcgtccgacgccgcggcggccgcggcggggcagaggcaccgggtcgccgcgttcgacgacctctcagtcaccctcgacgtctcgccgtcgctcagggcgttcctcgtcaggggctgcccctttgtcaccgtcgccaccgccgacgccgcgggccccgtcgacatctccgtcgcgtccgtccacgccttcatcgaggtggcctcctgcgacgacgcgctcaccaagtggcggctccggatgaacagcggccagaccttcctcctctacgcgttcgcgccgatccgcctcgcgcagtccagcgtcacgcagctgtcggccctcggcttctccggcgtcattcgggtcgtctacctgccggacccgtccatggaggctgttcttgatcaagacagccggtgctttccaaccgccgcgaggccctcgtgaaccgccc

SEQ ID NO: 39907 - DNA, 582 bp, Oryza sativa
  Clone ID: uC-osroM202021d03b1
tttaatgtttctttatcaaagcgatctaagactgtttctaaatatgtcaaacactaacaatcgacctgctacggcttccgatattcgtgttgatgttcaacatggtcaaaatcagagtcaaacatccggacaacaattgaaaaatgatgcagagcgtaaaggagccgaactggccaacgatgcatcacgaaaagctgatcaagccaaggccgctggagcccaattggcaaatgatgcctcgaagaaagctgatgacttgaagaatgctgctggagagaaagttgaccaagcaaaagctgccggtgctcaagcggccaacgatgcctcgaagaaggcagaagaatggaagaatgctgctggagagaaggctgaccaagccaaggctgctggagctcaattagcgaatgatgcttcgaagaaagccgaagaattgaagaacgcaaccggagagaaagttgaccaagccaaagctgccggtgcccaaacagtcaacgatgcgtcgaagaaagccgaggattcgaagaacgcggctggggaaaaagtgaccaggcgaaagcagctggtgctcaagcgcgaatgaca

SEQ ID NO: 39908 - DNA, 475 bp, Oryza sativa
  Clone ID: uC-osroM202021d04b1
gagattgggagggctgttaatgggctgcggaagcacaactcgcagcaaattcgtcaccttgtgcgcactctcattgaaggttggaaaattttggttgatgagtgggtcagcaccactaatgttgcccttacagacaactccccgggctcttcaaaaacatctgttgtcgatgatgctgatgatgaagggcttccttctccacctctggatgaaggggcgttctttgcaacccagactactgctattcaactctctgagttctttgatgaaatggatgaagatggaaacttgagacataacaatgatgggagccttggaaataagagagaaaattatggcaggaggcctacaagccatccagctttgacaaagcaagagcctccccgtaacatgggagctgttgaaaaagttcaatccaggaggccggaattggcaaggcaagagccaataatgaggcaggctaacccacataccc

SEQ ID NO: 39909 - DNA, 441 bp, Oryza sativa
  Clone ID: uC-osroM202021d08b1
gagtagtaactcgccttattacattagaatcaaagaatgaattgaatcagtttacagaaagaatggtgctatgaataaaaagaattgaatgttggaaccccagcaaaatagtgcaagctcctaaaattttgcttgccaagtgacatactatctgaataccctcctcttccacacttctttaccaccgctctgttagtgcgctaagctggagcgagttcagtctcccttcaacaagttaaaattatgctatctgaataccctgctcttccacacattttaccaccgttgtgctaataagctggagtgtgagttcagtctctccctccaacgacatgttaaaattatcttgagaattgctgcagctgtatgatcacaatgctgatatcgtcagtcgagcccctagtaaccgtagtttcgacgagcctcctgcaagcagtcatg

SEQ ID NO: 39910 - DNA, 460 bp, Oryza sativa
  Clone ID: uC-osroM202021d10b1
ccaagaccaccaccttcatcttggttggcttcgttcactccgcctacctacctacctctgcagttggtttgctgaaccctcctcaagaacccacgcctctcctctcgcggcggcagctaaccgagccatggcgcgcaagaagatccgggagtacgactccaagcgcctcctcaaggagcacctcaagcgcctcgccggtatcgacctccagatcctctccgcccaggttacacaatcgacggacttcacagagctggtaaaccagcagccatggctgtcaaccatgaagttggtcgtgaagcccgacatgctgttcgggaagcgtggcaagagcggacttgtggccctcaacctagatattgctcaagtcaaggagtttgtgaaggagaggctgggaagtcaggtccagatgggtggctgcaaggctccaatcaccaccttcattgtagagccatttgta

SEQ ID NO: 39911 - DNA, 321 bp, Oryza sativa
  Clone ID: uC-osroM202021e03b1
tttatggatgcaaccagtcctgcctggacaaacacgagatagctagctagctagcaaacaatggcggcggatcatgaattgctagctgcatcagaggacctggtggaggtggtggtgctgggcatggtgtctgcacatagtatgcacaaactcgagggggcgaacaacacgactagccctaacgcggtggacatagtgtacaaggagatgaacaggagttaagcgagccgactgagcttgccgaccccgagctgaggatcttcttactggactgttacctggcccgatagaagggggacatcctgctggccaactatatga

SEQ ID NO: 39912 - DNA, 429 bp, Oryza sativa
  Clone ID: uC-osroM202021e06b1
tgccgtttgtcgagcctgagatccttgtcgatggctctcatgacattgagcgctgtgcctatatcaccgagaaggtcctcgctgcctgctacaaggccctcaacgaacaccatgtcctcctggagggttccctcctgaagcccaacatggtcaccccaggatctgaatccaagaaggtttcccctcagctcatcgccgagtacaccgtccgcgccctccagaggactgtccctgctgccgtgcctgccattgtcttcctctctggtggacaaagcgaggaggaggcgaccgtgaacctcaacgccatgaacaagctcagcaccaagaagccgtgggctctgtccttctccttcggccgtgctctccagcagagcacgctcaaggcctggggcggcaagacggagaacgtggtgaaggcgcaaaaagcct

SEQ ID NO: 39913 - DNA, 376 bp, Oryza sativa
  Clone ID: uC-osroM202021e07b1
gctcgcactcctgctttgtctgactgtgtgaacaactgctgccgacgactgccggtggtgtgctccggccgctcacgcacatgatgggtgcacagcgagcgaactggccgctggcgctggcactcgcgcttgcgctgtagggggaccggaaagcttgagacagggacgggcacaagcccaactgtacggacagcctgagaacagcctcagttacccaggccgtttaggcataggacagaacattcacacttaccaaagatgcagggctatgtgtcagttcggcggccgtatgccgttcatttgggacgactttttgtacacctccatatatgttgaacgaaatgacaatggagatgcattcacttaccaagagcat

SEQ ID NO: 39914 - DNA, 487 bp, Oryza sativa
  unsure (1)..(487): unsure at all n locations
  Clone ID: uC-osroM202021e09b1
ttgtggtagcaacaatctctgctgtgcaacaccggaatcttgttaaattgcatgggtgctgcattgatagtaaaacacccttgttagtttatgagtaccttgaaaatggaagcctggatcgagcaatatttggacatagtatcttaaaactagattgggcaatgcgatttgatatcattttaggcatagcaagaggcctaacatatcttcatgaggagtcaagtgtccgcattgtgcatagggacatcaaagccagcaatgtcctacttgacactgacctcaccccaaagatctctgactttggacttgccaaactatatgatgagaagaaaactcatgtgagcacaagaattgcgggcacaatgggctacctagctcctgagtatgcaatgagaggtcatttgtcagagaaggccgatgtttttgcatttggagtacttatgttggagactngtgctggtcgatcgaatacaaacaacttccttga

SEQ ID NO: 39915 - DNA, 349 bp, Oryza sativa
  Clone ID: uC-osroM202021e10b1
tagagagagggagatttattggccgtggcggcgcgggaggaggaggaggcgtctacggcggcgaggagccggcaggagagcgagggggaggaggaggaggtgatggaggtgctggacttcgacatgctgtgcgcctcggtggcgctggcggcggagaggaggaaggattcggacgctgcggcggcggccacggtggaggccggtggtggaggaggcggaggaggaggaggaggggtgcataggatgtgggaaggggacgtggagctggattgcttggaggacatgctaattgcgcttgatgcccattgctgcccatgctacatgttcggcatgaacatgcggagagcca

SEQ ID NO: 39916 - DNA, 451 bp, Oryza sativa
  Clone ID: uC-osroM202021e11b1
tttgttgtagccgttggccatgaagcaatcacgaagggaggaagtggacgacgatgtgagcgttggtaagaaggaggaagaagcaggatactgcaggagcagcagcatctcacgcctcccagaggcatgcctggctcatgcaatctccttcaccactcccacggacgcctgccgctgctccgccgtctccgccgacttccaagcagcggcgagctccaacgctcgtgtgggagcgctttctgccgccggactaccactccattctcgctcgagccgacgatcctgtggatttcaccactttcaacaaggagctcttcctcagcctcgcccaggaccacgttcttctagaccaacgcagcatgagtttctggttggaaagaacaagcggagcttaaagcctattggtatcatccagatcattagagaaagcatggggggatgatgcccggtt

SEQ ID NO: 39917 - DNA, 366 bp, Oryza sativa
  Clone ID: uC-osroM202021e12b1
ttgtttttcgcactcccccctcccttctcctccgcccccgactcgctgcttccacctgcacccgctgctctcctctccgccgccgtcggcgtcgccgccgtcgtggaggccgtacgccaccggtctcaccgacgccgacgacctgcaggcgcccctctccatgactatgatgacgccttccccgctcgagccggaggaggacgagatgctcgtgcctcaccaggagctcgtccctgttgacgccgtccaacctatggaagatgttgggcaaacggaggcagctagcacggctgagagccagccagctgaggacccctagacaatcatagttcacgtggacgatcgagaactttaaccggatcaatg

SEQ ID NO: 39918 - DNA, 471 bp, Oryza sativa
  Clone ID: uC-osroM202021f02b1
gtcgcttcctgtctctcctccctttgcttgcatctgtagctagcagcagcttgatctggaatactccagccagctagctagctcggatcgatcgatcgggatgctgcctgggcgtgaagagatcgaggtgatgatcaggtgatccatcgatctatatgctgctgactagctgctgcatgcatgcctgccatcccgtctcttgaatcagcagataccgcatgcagagattgcaggaacagcttagatctgatccgaatatatatctggttcagtatcaagaaatcgagctacatatgaaaacttcatttctaagctccagcagctagcgtgatatgatagtgtgattgatatttgatacttccttgagagagacgcatacgatcgaatcggatgcactgcacctgagctaagctagctcaagcttgctcgatcagctcatgtacttggtgagcccaagaaatggcgacgagg

SEQ ID NO: 39919 - DNA, 431 bp, Oryza sativa
  Clone ID: uC-osroM202021f03b1
gtcttttccaggggtgccgttggatgggcgagcgcgggggccatgccgcaaatccatgtctggtgtagctttgggccgttgcgccctgcgctagcaggcgcatgaagacgctccgcacataaccccgttgcttgggccgctatggtgatgttctgctgtaaggcctataagcatatgaccttggttcgattgcggttaaaagcggccccctcggaacaagagggggggcaccgtcttcacctacctggtcagcgcgtgcttggagagcgcaagcaagctcaaagcccaactggggggcaacaacagttgcgacgacccgcgtggcattctagacgagaaccaggaggcatcagactgcttcaggggtgcccgcatggggtggaagatgtgccccaaggtctctaagaccgggggagcaccatcatcagctt

SEQ ID NO: 39920 - DNA, 387 bp, Oryza sativa
  Clone ID: uC-osroM202021f07b1
ctgatttctaatcaaacacaaaaacaccacaaaaagcagtcacctccatcagcatcacacctggtacctcgttgggctatttacgcattgactgttgctggagtccttttcattgcagcagtagctactgccatatatgtattcttctcccgtagaaagaaggataatactgtcatgccatgggctacagggctgagtggacagctaaagaaggcatttgtaacaggtgtgccttctcttgagaggacagagctggaggcggcatgcgagggttttatcaatgtgatcggcactttacctgaatgcacattgtataagggaactctgtcaagtggagttgaaatagctgttctgtgcacttcacttaactctgcacaacaatggtct

SEQ ID NO: 39921 - DNA, 506 bp, Oryza sativa
  Clone ID: uC-osroM202021f09b1
gtcgcgcttagcgtaactagacgaacgtactagcagaagaagaagaagaaaatgccggtgagccggatcgcggtgggcgcccccggcgagctgtcccacccggacacggccaaggccgccgtcgccgagttcatctctatgctcatcttcgtcttcgccggatcgggatccggcatggccttcagcaagctgacggacggcggcggcacgacgccgtcggggctgatcgccgcctccctggcgcacgcgctggccctgttcgtggcggtggcggtgggagccaacatcttcggcgggcacgtgaacccggcggtgacattcggcgcgttcgtgggggggaacatcagcctggtgaaggcggtggtgtactgggtggcgcagctgctggggtcggtggtggcgtgcctgctgctcaagatcgcgacgggcggcgccgccgtgggtgccttcttgctgtcggcgggcgtgggcgcctggaacgcggtggtgttcgagatcgtcatgac

SEQ ID NO: 39922 - DNA, 530 bp, Oryza sativa
  Clone ID: uC-osroM202021f12b1
gtcagtggaacatgatgaataagaaaatggtcaatggtgggagagtcaacaactgggcatgtattaacttctctagaaatgtgcaagatagtgctgccaggggcttctgtcatgagctggctatcatgtgccaaatatctggaatggattttgcactggaacctgtgctgcccccacttactgctagacctgaacatgtggaaagagcactgaaggcacgctatcaagatgcaatgaacatgctcagaccgcagggcagggaacttgatttactgattgtaatactgcctgacaataatggttctctttatggggatctcaaaagaatctgtgagactgatcttggattggtctaccaatgttgtttgacaaaacatgtttttaaaatgagcaagcagtatcttgcaaatgttgcccttaaaataaacgttaaggtggggggaaggaatactgtacttgtggatgctttgacacggaggaattcccttgtcagtgacagaccaactatcatatttggtggcgatgttact

SEQ ID NO: 39923 - DNA, 530 bp, Oryza sativa
  Clone ID: uC-osroM202021g03b1
ctttattctctcctagctcccagagaccagagtagtagagagagagaggaggccaagcagcatcagcgggcgcaggccagacaagaccgatcttgctttcaccgatggagatccacctatagagctgatcggagcttgaggatcacagctggccccggaatggctagaccccagctagcgtaggtctggagcggtgctctgatcaatatcgtcaggcaatggcacatgactggtatctacgctggcatgacgggggctccattctgagacacagagaacttcacattagaagaacttcttgacgaggatgaaataattcatgagtgcaaagcgctgaatactcgtctcataaaatttttgcgagacaaggctcaagtggagcaattggcttcgttacatcgtggaagaagtaccagaagattcttgaaagaaacggtcttttaggttccattcattgcttgtgagatatttacctgggaattgacatcatcttgaggaccttagtagagatgaaagctaatggatttgct

SEQ ID NO: 39924 - DNA, 445 bp, Oryza sativa
  Clone ID: uC-osroM202021g06b1
ttttgttcaagtcactgtattgagcttgcaggcgacagctacagcagccagctaccaccaggcttgatcttgtcggttcctcaagctcgggaacagagcagagagagaaggaatcctggtgctttgtttgatcatccctcagatccatggcgcagctgcttaatagagaagaggaggaaagattgatggagaagaagggtggtccaatttgaaacttttataaatttattagtccaaagttgctcttagccaccagcgccgttccaagcctcgttcagtcgttcctgcgagccctaccgtgtgctcacgacgccaccagtgctcacgacgcgcgcgcgttcgcatatggccaccgttttcggcaccgaccgtcttcgtgacctccacgccttcgacgacaccaaggccggtgtcaagggcctcgttgacgccggcgttaccaccg

SEQ ID NO: 39925 - DNA, 450 bp, Oryza sativa
  Clone ID: uC-osroM202021g12b1
aattaaaatctcagagaaactatccataccaactaaccatgtacagaggcaaatagtagccttacagtatgaggtgagtagtaactcgccttattacattagaatcaaagaatgaattgaatcagtttacagaaagaatggtgctatgaataaaaagaattgaatgttggaaccccagcaaaatagtgcaagctcctaaaattttgcttgccaagtgacatactatctgaataccctcctcttccacacttctttaccaccgctctgttagtgcgctaagctggagcgagttcagtctcccttcaacaagttaaaattatgctatctgaataccctgctcttccacacattttaccaccgttgtgctaataagctggagtgtgagtttagtcttttcctccaacgacaagttaaaattatcttgagaaattgtgcagctgtatgatcaca

SEQ ID NO: 39926 - DNA, 318 bp, Oryza sativa
  Clone ID: uC-osroM202021h01b1
caggaaacctgcatccatatccatttagggagtcaaatagtgtaactaccatgggggtgatggggataaactttacatgtcaatcttggcgaatgaggaataaacaacgatctaggcacagaatcaagaatatcaacatgtttgccgtgtcaatcctgaacgagggagcatgagtttggaagaaacttgatggctgccagatatagttcctaacagattatacgcaaaaacttcctggccatatgggtaactattttcaaaatctcagcagaaaaccagctgcagatgcaaaagggggaaaatctacatgaaagcacc

SEQ ID NO: 39927 - DNA, 419 bp, Oryza sativa
  Clone ID: uC-osroM202021h09b1
ggttacatataaccccgcaaaggataaggtatatgctttgctcaaggatcaagcaaagtcagatgacattatcaaagcggctttccatgctcacgtattactgcatttcatcaatgcgtcacatgcacggaagcagatgaactccaggagatcagatccttatggaaacccatgtaacatggatttcatggcacacatagctgagtcctgcaaaattgtttcttcctcttatggaactttcaagaagaaagctagagaacagggttggataatgtcagaatcactgctcaaccctgggaaagctcggttgtgtcctgcaaggccataatgattttactgttactgggatggcaacatctttcagactaacttctcaactagaccggatgctcggttgtttgtagtagctgaactgacaa

SEQ ID NO: 39928 - DNA, 555 bp, Oryza sativa
  unsure (1)..(555): unsure at all n locations
  Clone ID: uC-osroM202021h10b1
tctatcaaagaaaaaacaaacatttcatcagagagagagaatctactagcctactactatacaaagttggggggaaagggagagatttttgttcatagtttgggaacaaagtttagttcttttcttgggggagtctccaggcgaatgttgcagcggccaaggtaggaatgaagaggaggatgagaggaggaggaggtgcagccatggccgtggccactggagctgtgatgctgttcttggcagctactctctctggggttagtgccaacacagactcagatgatgtgaatgctctcaatgtcttgtacacaagcatgaattctccatcccagctgacgaattgggtgtcacaaaatggagacccctgtggacagtcctggcttgggatcacttgctcgggttccagggtgacagcaataaaattatacggcatgtngatcaacgggactttgggctacaacatgaatctactgactttactagttgaacttgatacgagcaagaataatcttggaggcagtgacatttcttataacctttctccaaattttgaga

SEQ ID NO: 39929 - DNA, 478 bp, Oryza sativa
  Clone ID: uC-osroM202021h11b1
aattaaaatctcagagaaactatccatacgaactaaccatgtgcagaggcaaatagtagcctgacagtatgaggtgagtagtaactcgccttattacattagaatcaaagaatgaattgaatcagtttacagaaagaatggtgctatgaataaaaagaattgaatgttggaaccccagcaaaatagtgcaagctcctaaaattttgcttgccaagtgacatactatctgaataccctccttttccacacttctttaccaccgctctgttagtgcgctaagctggagcgagttcagtctcccttcaacaagttaaaattatgctatctgaataccctgctcttccacacattttaccaccgctgtgctaataagctggagtgtgagttcagtctctccctccaacgacaagttaaaattatcttgagaattgctgcagctgtatgatcacaatgctgatatcgtcagtcgagcccctag

SEQ ID NO: 39930 - DNA, 115 bp, Oryza sativa
  Clone ID: uC-osroM202021h12b1
gacagcgggcagccgcccttttcaaggggttataatttaaaacggaggaaaaccatctataccgtcgtgaagtggttcagaagcaaatcttcctcgtgataaatgacgtggggaa

SEQ ID NO: 39931 - DNA, 427 bp, Oryza sativa
  Clone ID: uC-osroM202022a01b1
tgaggatccccctgtgttttctgagccagctcttgttaattctcacaacgatggaaatgctgaaaattgcaagttaccaaacggagttgcagttgaagccatgggtcaaggagtggagaaccaaaacattgttggctccaaggcaccaactagtccagagaaactaagcgaagagctagctgcagtgaaggcacaagcggcctttcgaggttacctggcacgtatggcattccgtgcattaaaaggtatcataagactccaggcactgatccgaggacatcttgtaaggagacaagctgcatcaacccttcgtgtgacatggttgatcgtgaaactttaagctttagttcgtggaagaaatgttagactctccggtgctttcattcaatttgttgtgaagtcccgccaacataagtttctgagtgat

SEQ ID NO: 39932 - DNA, 368 bp, Oryza sativa
  Clone ID: uC-osroM202022a02b1
attactttgtctggtccgagctcaagccgtactcaaaagcggtgcctctgacgacagcagacagcagattgctgaccgagcttgccaagttctgccaggcagtctgaccggaccggaccaattcaagcacatacccatacaagcgaagcgtgatcagcgcttggcaaggttgccgcataagccgtggtattatgtccatggcgtgtccttggaatgcatagtgggcagcacacgcctgagattgctacattcactgctttgtggcactctggtgcaacagcaggtggcttgagacacatcatccaacttgtctttagtgtgttcgcttcagctaccagacatttaaacagggcgcttgaacccggaac

SEQ ID NO: 39933 - DNA, 352 bp, Oryza sativa
  Clone ID: uC-osroM202022a03b1
attatattggacaaccagttttggcgcattgtgcatgatgtaacatatagaacggctacaaacccagaaattgatgatcctcttaagtattcatcttgtgcaacaacaccagcacatcccgataaagctggatatatttgtcagacgctccctttcttcactagcctgttgcttggcaaacttccttgcaaacttgacagatcaagtccatcatatgacatattgtttatgctaaaagttctagaggggttgaaccgatactcttttcacctcgtctctgatgagagaaaccgtgcttttgtacatggaagcataactgaccttgatgatctgaaagttgatgtttctgtag

SEQ ID NO: 39934 - DNA, 390 bp, Oryza sativa
  Clone ID: uC-osroM202022a05b1
cgtttcgccaccgcgaatcccaccaccacccgcagatctccgcctcggcgccattgcccaccctccacgcccccgccagattcgcccagatccacagccgggtgcatccggcggcgtggctggggcgccctcgatcgggaagctttgatcttcgtaccctttttgcggtgggcgggcggcgggcggcggaggaagaggaggagatgggtgtcggcggggagaagttccagctggggacggtgggggcgctgagcctctccgtggtgtcatccgtctccattgtcatctgaacaaggcgctcatgagcttcctctgcttcaactttgccactaccttgacgagttggcatcttcttgtcacattttgctccctccatgtagcattatggat

SEQ ID NO: 39935 - DNA, 384 bp, Oryza sativa
  Clone ID: uC-osroM202022a06b1
cttctttcctccacttactactctttgtgagagtgagcctctcgccattgttgcctcgataagaagcttaattagctcggaagccttttcacttttcagccatgaggctgtcgtccctgctgttcttggtgtgcttcttcactgtcgccatgtcgcaatgcgcggcggcggcgaaggcgaggcacttcaggtgggaggtgagcaacatgttctggtcgccggactgcgaggagaaggtggtgatcggcatcaatggccagttccccgggccgaccatccgcgccaaggccggcgacaccatcgtcgtccacctcaagaacggcctgcacaccgagggcgtcgtcatccactggcacggcatcaaacagatccggacaccatggg

SEQ ID NO: 39936 - DNA, 260 bp, Oryza sativa
  Clone ID: uC-osroM202022a08b1
gtatagtgtgaagaggcatttgcgtggtcctggagcaatcccgataggaaagcctgctattcatgcttttccaattgacctgaaagggaaggcttatgagttgctgcgagagaaagcatcaagatttctccttgatgattgttacaggactccaggaggcattcaatatgaaggcccgggttgcaatgcataacccattacattgaccattgagaaccaagactacatgggcgacatttgagatactgtaagactgtctt

SEQ ID NO: 39937 - DNA, 381 bp, Oryza sativa
  Clone ID: uC-osroM202022a10b1
tatccgcctcgccgccgcaaccaccgccgcctcgccgcagcatcacccgcagccgccgccgccgccgccatggactccgtcgcgtcgtgggggctgaccccgctcgccgcggccgacccgctcgtccacgacctcctcgagcgggagaagcggcggcagcggagcggcatcgagctcatcgcctcggagaacttcacctccttcgccgtcatggaggccctcggctccgcgctcaccaacaagtactccgaggggatgcccggggcgcgctactacggcgggaacgacgtcatcgacgagatcgagaacctgtgccgagaccgcgccctcgacgtgttccggctcgacgccgcgtcgtggggcgtcaacgtgcaaccctac

SEQ ID NO: 39938 - DNA, 412 bp, Oryza sativa
  unsure (1)..(412): unsure at all n locations
  Clone ID: uC-osroM202022b02b1
gtcttgacatgctgccgccgggcgacgacttctactcgtcgctcttcgcgtcgccgcgggtgaaggggacgacgccacgcgccggcgccggcatgggcatggtcccgttctgaggtgacggcgacgcgatcgaacaggtggtgatcgatgctgcaacgtgtgtaaatatacagcgccggctgggtcaagagatggctcgggtgacgcgcgcgccgcgtgtcctggcgttggcgccggggcattctttagtttttcatcttttcatcatctcagatggtagataccaaacagnggaatggatgtagcttctgtttcttctctatagaaccccaacaaatttttgttgttgatgttgtttatcttcaaaccaaaaagggtaatttcttgcttttaactaatgatttaatttttt

SEQ ID NO: 39939 - DNA, 360 bp, Oryza sativa
  Clone ID: uC-osroM202022b05b1
ctttcagagagcaattctcttctcctacctagcaacctagtgcagtgcagtgcagtgcagcgaaggtttacttggcgacttccatgggttgcctgttgatgctctgcttggtttctcccctcctcctcgccacctctgtccacggcaacccgtggtatgggtatgggtatggcttgttcccgcagttctacgaccactcgtgccccaaggcgaaggagatcgtgcagtccatcgtagcacaggcggtggccagggagaccaggatggcggcatccttggtcaggctgcattttcatgactgctttgtaaggggtgtgacgcgtctgtgctcctggacaacagcaccaccatcatcagtga

SEQ ID NO: 39940 - DNA, 84 bp, Oryza sativa
  Clone ID: uC-osroM202022b06b1
aattatttttgtattttaattgtttttttcgtttttcatgcttaaaacgaggctggtgtaggatttcaaaaatgacgctgatgc

SEQ ID NO: 39941 - DNA, 370 bp, Oryza sativa
  Clone ID: uC-osroM202022b08b1
gtatctcacaccggaacaaaaacgagaagccagcgaagaggcaaatcaaatcgaatcgcccaaaggaggcgacgagccaccggctgcagcctgcagcgggagaggtctcaggtgcgggggagcagaggcctcgtcggcgagcgcggggacgccccatcgcggtgccccaccgccggcgaacggggcgtcgcggggttcggcggggatcccgccgtggagcggcggcggcggcggcgtcgtagccggagcactccgatcgtggcgaatgtcggtggggagagccgcgaaatcgctttcggcgtggagctgttgcctgtaggagatgtggagattgggcattggagtactggagattgaagttctgcgaggg

SEQ ID NO: 39942 - DNA, 466 bp, Oryza sativa
  unsure (1)..(466): unsure at all n locations
  Clone ID: uC-osroM202022b09b1
ttccgctgcttggtcaccgacccctcggaacgccgttcatctgagaaaggatggcggtcctggcggagatcgccggcgacgagtccccgccgccgcttcctccttccgaaggcggcgaagcttccggagccccgtccacgtcttctccctccgatgccgacggcggcggcaagccttcgccgcgcacgtcgaagcccggcaggaagcgcctcgtcctcaccgtctccgtcctcctctcgttcctcatcgggctgcccttgctgctcaagtccaccgagatccaccgctcgccgctgccgtccgacgcaatcgccgacctatcccgccgncttcacttcaacccgccctcgttcccctgcggcctacatgcggtctttctccgcttcggccgcgaccccttcgaggccttcgtcgcacatcgcatcgagcgggaaatcttcacccacctcggtgaatcttcctgacg

SEQ ID NO: 39943 - DNA, 304 bp, Oryza sativa
  Clone ID: uC-osroM202022b11b1
atctttactctctctctccgccgccgccgccgtcgccgactcttgcctttcccacgccctcgatcttggcggctggagagccatggcgatgcactccggcaggcgagtcttgtagccaggaggggtcagttccccagtcacccaccccacacacgaagatagcgagcttgtagcgtgatttttttttgtaggccgtcgaacttgcacctatggcgaccgagaacccctttgacctcctcggcggcgacgacaacgacgaccccgcgcagctgctggccaaggcggtcgtcgcggcgcataatgc

SEQ ID NO: 39944 - DNA, 345 bp, Oryza sativa
  Clone ID: uC-osroM202022c12b1
gtcatagcaaggggcctagactgcggtgaagccctccaactcacaggcgccatgtcgatgtcactgtaccctgggatggatcttacgaaaatggatgctcctaactcttaccctccttggagcagcctgctgtgtaatgctatcgatgcatttaacagtacagctggtgtcacagcatcttttctattgtaagaatcccaaggagcacaaaggttatacttattatcgcacaaatggctcccttatatgccataaatcccctggttgggcttctggatatcaagggaatcaaaacatttttcacttttcttggaagcctgctaagaaaagcttcggggcaaatga

SEQ ID NO: 39945 - DNA, 344 bp, Oryza sativa
  Clone ID: uC-osroM202022d01b1
agaaacaatggtagatcgagcaaacaaataaagaaggaaatgacataagtaagggtagcaactagcaactggtgtgacttttaaaaactattaaattagaaacataaggatgatataaggtttggactttcaaactcttaagacatgtagatagctatttaataaattttaagtaaaatcatataaaaaatatatataattttgtatgggtgctagccttgcctgggccatcaagctagttgcaaattatttaggtataatttcgttcgatgcaacttgggcattgttgtcttgctgatccttgagctttttgaacagcttgcgttgcacgttcttgtttgaat

SEQ ID NO: 39946 - DNA, 394 bp, Oryza sativa
  Clone ID: uC-osroM202022d03b1
ctttttcgcgtgcccttaaggcgtttcacttggacacaaacgattggggttgcaacgttcagccgtactctggaagcgtggctaacatagctgctcttatttccgttctagaaccaactgataaaatccttggattagcattgccctctgggggacacttgtctcacggacaccaactggaaagtggaaaaaagatatctgcgacttccattttctacaactgctcttcttacggcattgatcagaccactgggttgttggattatgacaaacttgatcaacaaattcaggattttaaaccaaaattggtaattgctggcgcgtctgcatacccgagagactgggactaccaacgcatgagagaatcgtgcgacaagggtggagccttcttgat

SEQ ID NO: 39947 - DNA, 352 bp, Oryza sativa
  Clone ID: uC-osroM202022d04b1
ctctcacctacactccgctgcgcagccagcttcgctcgcccgctacctcactcactctcgggtgagcgcggccaccgctgccggcgacgaggtagggaggaggaggagggcaagatgttcgggcgggacccgtggggcgggccgctggagatctcgaatgcggactcggcgacggacgacgaccggagccgggacctggacaggggggcgctgatgcggcagctggacgagacgcaacagagctggctcctggccgggccgggcgaccaggccggcaagaagaagaagaagtacgtctacctcggctgcatggtcctcgaccgcaagatctttatgtggacccgaggcacca

SEQ ID NO: 39948 - DNA, 392 bp, Oryza sativa
  Clone ID: uC-osroM202022d06b1
cttgggctggccctcaacttctcggtgttttattacgagatcctcaactctcctgaccgtgcttgcaatcttgcaaagcaggctttcgatgaggctatctcagagctggacactctgagtgaggaatcctacaaggacagcactttgatcatgcagcttctgcgtgataacctgacgctgtggacttccgatatctcggaggatgctgctgaggaaatcaaggaggcccccaagggcgaatcaggagatggacagtgaacatgatcgaatgcgtgcgcccacaaactagaatagtgacgctgcaaatgtgctgtgggttatcgtttcattttatagattgtaatgtctcgtgatttgtcggaaacaggaggcgctccccaattatgttgtgc

SEQ ID NO: 39949 - DNA, 389 bp, Oryza sativa
  Clone ID: uC-osroM202022d10b1
gctgacccgatgaaggtggtggagcgagttcagaagaagaccggccggaaggtggagctcctgtcgccgatgcctcctccaccggaggagaagaaggaagaggagaagaaagaggaacctgagcctccaaagcctgaggagaagaaggagccgccggtgatcgcggttgtgctgaaggtgcacatgcattgtgaggcctgtgctcaggggatcaggaagaggatcctcaagatgaaaggggtacaatcagctgagcctgacctgaaggcgttggaggtaaccgtgaagggtgtgtatgaggaggccaagctggccgagtacgtgcacaagcgcaccggcaagcacgcttgcatcatcaagtctgaaccggtagccccttccgagaaggt

SEQ ID NO: 39950 - DNA, 404 bp, Oryza sativa
  Clone ID: uC-osroM202022d11b1
atatatatatatatatttattccaatccaataaaacaaaatacatacaacatatcacccagaagaaagtaagcctgcccgtcctgatcacctcactttatttgtgcattacattacattatccaacacacacacacacacataccccaatcttttatcatatcatttccatctttatttgtgcatgcacgtcacatgacattacttactttatttgtgcacgtactagtagtagctcgtgcatgaatccagtgaagtgatcagtgatcaaagtgaaaatggatcaaggtctggttaattaccagccgtccatcacagaacctgatccaggagaccaggcttattaccaggcgtccattcggtctttttgtcccagtaccttgttcagaccatgatgccccatag

SEQ ID NO: 39951 - DNA, 296 bp, Oryza sativa
  Clone ID: uC-osroM202022d12b1
ttatatccatccatcgatcgagaattcctcttctccctcttcttgttcttcttctcctctctgaatttaacaagaaatcaagaactaggtgtttgttttgactaacatgaactctgtcgaacactctgcgtgcgtgattgtttgtgtgtgtcatgtgctatgggccgtgcaagccgttcacaccgccggtgccgcaacagcagaaggaggcgactgtgatggctgagtacttgcttcttgagctggcggcagcggacgacgtggcggtggtgaggagggtcgtggtagatgagaat

SEQ ID NO: 39952 - DNA, 473 bp, Oryza sativa
  Clone ID: uC-osroM202022e07b1
gttgaagcattctgagttcatcagctaccctatctccttatggactgagaagacaaccgagaaggagatttctgatgatgaagacgaggaagagaagaaggatgctgaggagggaaaggttgaggatgttgatgaggagaaggaagagaaagagaagaaaaagaagaagatcaaggaagtctctcatgagtggaacgtgatgaacaagcagaaacctatttggttgaggaagccagaggagatcaccaaggaagagtatgctgcttttctacaagagcttgacaaacgactgggaggaacatctggctgtcaagcacttctctgtggagggtcagcttgaattcaggccatcctgtttgtaccaaagagagcgccatttgacctctttgacaccaggaagaagcaaaacaacatcaagctgtacgtacgccgggtgtttatcatggacaactgtgaggagttgatcccagagt

SEQ ID NO: 39953 - DNA, 327 bp, Oryza sativa
  Clone ID: uC-osroM202022f02b1
ctctatctcacttagcctgagctgagcaatggggctactccggcgaggtagtagcggcggcggcgccgtgctcgtggtggtggtgtgtgtaggctgcattgcggcgacggcgatggcggcggcggcgggcggcggcggaggaggaggggagtgtcccaagtacaaggactcgaagcagccgctgaacaagaggatcgacgacctactccggcggatgacgctggcggagaagatcggccagatgtcgcagatcgagcgcgagaacgccaccttcgacgttatgcgcaactacttcattgggagcgtgctgagcggcggcggcagcgt

SEQ ID NO: 39954 - DNA, 433 bp, Oryza sativa
  unsure (1)..(433): unsure at all n locations
  Clone ID: uC-osroM202022f03b1
atctaatccaatccatcttccacgcgcattccggatccgcggaccaagggaggatgtcgtcgtcgtcgtcgccgcccgccgcctccgccgccgcgaggcaggatctggacggcaaccccatcgcgcccctcaccatctgcatgatcggcgccggcggcttcatcggctcccacctctgcgagaagctcatggccgagaccgcccacgtcgtctacgccgtcgacgtctactgcgacaagatccgccacctcgtcgaccccgccccttcccaccttcatggccgcatctccttccaccgcctcaacatcaagaacgactccaggctcgagggcctcatcaagatggccgatctgacgatcaacctggcggcgatctgcacgccggccgactacaacacgcgcccnctcgacaccatctacaggaactttatcga

SEQ ID NO: 39955 - DNA, 346 bp, Oryza sativa
  Clone ID: uC-osroM202022f04b1
ccaagggcaccatcgtgttcccgtcggtgtacgagtcgtcgttccaggggttccccgagccggacacgttcgacccggagcgcttcttctcggaggcacggagggaggacgtggtgtacaagcgcaacttcctcgcgttcggcgccgggccgcaccagtgcgtggggcagcggtacgcgctcaaccacctcgtgctattcatggcgctcttcgtctccgtcgtggacttccggcgagaccggacggagggctgcgacgagccggtgtacatgccgaccatcgtgccgagggacagctgcaccgtgtacctcaagcagcgatgcgccaagttcccatcttctgagct

SEQ ID NO: 39956 - DNA, 374 bp, Oryza sativa
  Clone ID: uC-osroM202022f07b1
ttaccttctcctccggctcttcttcagtatcgaatcctctcttctcctcgtgcccaccaccaccaccgtagcaatggcgggcaacgggccgatcaacaaggaggacccgctcaactggggcgcggcggcggccgagatggccggcagccacctcgacgaggtgaagcgcatggtggcgcagttccgcgagccgctggtcaagatccagggcgccaccctccgcgtcggccaggtggccgccgtcgcccaggccaaggacgccgccggcgtcgccgtcgagctcgacgaggaggcccgcccccgcgtcaaggccagcagcgagtggatcctcaactgcattggccacggcggcgacatctacggcgtcaccaccg

SEQ ID NO: 39957 - DNA, 427 bp, Oryza sativa
  Clone ID: uC-osroM202022f10b1
cttcttcttcctcctcctcgcgctcccccgattcgaagcgtgaagagaggaacggcgcttgcgagaggagagagatggcccgtaccaagcagaccgctcgtaagtccacaggaggaaaggctcccaggaagcagcttgccaccaaggctgctcgtaagtctgctcccaccactggaggagttaagaagccccaccgttaccgccctggaactgttgccctccgtgagattcgcaagtaccagaagagtactgagcttttgatcaggaagctgcccttccagaggcttgttagggaaattgcacaagactttaagaccgatctgcgttttcagagccatgctgtccttgccctccaagaagctgcggaggcataccttgttggtctcttcgaggacaccaacctgtgcgccattcatgccaagcgtgt

SEQ ID NO: 39958 - DNA, 408 bp, Oryza sativa
  Clone ID: uC-osroM202022f11b1
tttaagtactcccaggtcaacaaggccaaaagggccagtgagtggctagcttaattagctaagctcatagtcatagcaatggctggagccgtgctggtgaggagaatggtggtggtggttgccattgccgccttggtggcgcccggcgaggtggcggcgcagctgacgccgacgtactacgacggcagctgcccgagcctgcagtccatcgtgaggtcggccatggcggccgccgtgcagcaagagccccgcatgggcgccttcatccttcgccttttcttccacgactgcttcgtcaatgggtgcgacgcgttggtgctgctggacgactcgtcgacgatcaccggcgagaagaacgcccggcccgacgccaactcgctgggcggattcgaggtcatcgacttcatt

SEQ ID NO: 39959 - DNA, 289 bp, Oryza sativa
  Clone ID: uC-osroM202022g02b1
ggagcaatcaaaaccagtacaagaatccaatacactccccaaacatatgcgatagcatacgaatccaaacatggtctggtaggtgaaacggattaaagtggcagtagcatcagcggcgctacggaccacacagcattgtactactactacattacccaaaagcacataaccaattaagcatcatcataccgaaacaataataaagattgcccaaacggtaggacacaacaggcgacactcaagatgggatcccaggagaaactccggcgagattactcgtcttcgggga

SEQ ID NO: 39960 - DNA, 347 bp, Oryza sativa
  Clone ID: uC-osroM202022g05b1
cgtctcgctgcccaaaaatttttcaatctctctcgcccacattaatcaccttcctcacgaggccaacgagcagaaatcccatttcatcatcattcataccaatcctctcggtttcttccgcgtccccggattcagtttcctcctcctctccccccctctcgatccctcctcctcttcccctcgttccagcgcgctcgccgtcgcccgccgccgtccgccgaccatggaagcagctggagtggaggtgaacggaggaggaggaggcgacgtcctggtggtggtgccgcagcagcatgaggtggcggcgaatcaagcggcggcggcggcggcggcgaaagggaagtccg

SEQ ID NO: 39961 - DNA, 492 bp, Oryza sativa
  Clone ID: uC-osroM202022g07b1
cggcgttaccgcatttttatttacatttaaggaaatagttcagtaaagtttatcaaactacaaagcagaatgggcgttgaagtaattccaatttcacctggagatggcagcacatacccgaaaaagaaccagaccgtcgttgtccactacaccggaacattggacgacggttccgttttcgattcatcccgaaatcgcggaaaaccattcaaattctgcatcggcaaaggagaagtaattcgaggctgggatgaaggagttgccaggatgtccgttggagaacgcgctaaattggtctgttcttcagactacgcctacggtagtagaggtcatccgggtgtcatttcaccgaatgccacctttgactttcgatgttgagctccttaaattggaatggattaataaactgcgcctttttttcaaacaaacagaaaaatattttttttccaaacaaataattaacgaacattcttgcacccaattttgaataaa

SEQ ID NO: 39962 - DNA, 442 bp, Oryza sativa
  Clone ID: uC-osroM202022g09b1
gtctctacctctctctcctcccttctcccacccaccccttctctctctacctctctctcctcccccttgtgggtgtgtgctgtggtggagaggagaaagggaggaagaagaggagagcaagaaccaaaaaccaagagctgctgccaaccctgcacagcctgggcttgtgatcattgattgcccaactattactaccttcctgtttttttcttctcatatagaagaatcccatctatctatcccttatacatattctcttcttctctttggttcttggaaaatctcccatcttcttctagaattcctttgtggcttcaaggggcctccacaccatatcttgaatagtagttgggtgctcttcttcttgttcttggttttcctgattgcttatgggggtggaaatttgcggatcttgtttacttggtctttcccccaatctttg

SEQ ID NO: 39963 - DNA, 417 bp, Oryza sativa
  Clone ID: uC-osroM202022g10b1
ttcgccggcagcggcggcccccgcggcgctgctcgtccttctcgccgcggccctcgcggcgaccggcgtcgtcgccgacggctccgaccaccgctacaaggccaacgagctcgtcccgctctacgccaacaaggtcggccccttccacaaccccagtgagacgtatcggtactttgacctgcctttctgctctccagagaaagtgaaggagaagagcgaggcactcggtgaggtcctcaatggggaccggttggttgatgcaccttacaagcttgatttccgtgtggattatgactccaagccggtttgctcgaagaagctcaccaaggaggaggtggccaagtttcggaatgcggtagcaaaggactactacttccagatgtactacgatgaccttccactgtggggattcattgt

SEQ ID NO: 39964 - DNA, 365 bp, Oryza sativa
  Clone ID: uC-osroM202022g11b1
ttcaagtccaccctcggctacacccaggagcagctcaacaccgtcggcttcttcaaggacgtcggcgccaacatcggcatccacgccggcctcatcgccgaggtcacgccgccatggttcgtcctcgccatcggcgccgccatgaatctcgggggttacctcatgctctacctctccgtcaccggccgcgtcggcgccaggaccccgctctggctcgtctgcctctacatcgccgtcggcgccaactcgcaagccttcgccaacaccggcgcgctcgtcacctgcgtcaagaactttcccgagagccgcggcgtcatgctcggcttgctcaagggttcgtcggccttagcggcgccatctttacg

SEQ ID NO: 39965 - DNA, 431 bp, Oryza sativa
  Clone ID: uC-osroM202022h03b1
cctatcctaatccccgacgctcgcattgggtggtcagattcacgtggcagcagcgccgcgggagctcgatggcggtggcagagcaggagctcgggctcgggggtggtggcgtggtgcaacagtttcgtggcggctcgccggcgaccgggcgacgcaagctcagattcacggaggcagtggtgccatgtgcaagaagctccatctggaaggtcctcctcttctgaacctcgcactgtccatcttaatagcattgttgaaccaaccattgaggtgcgctacatttttttttactcctctgcatttaatcagaaggaggcatggaatatatcggaaataattctagattgctggcacgttttgctctatttgattatttttctctgttcacaagtatgtgaatactgtcaaataatatgactaagtcatcagat

SEQ ID NO: 39966 - DNA, 301 bp, Oryza sativa
  Clone ID: uC-osroM202022h07b1
gttgtccatttcttggatcttggatgtgtagatctggccggagctgagctgagctcgtgtttcttgttttttttttggtcgttgcagggatgtaagccgccgccatcgtcggctgggggagcgtcggtggggatgagcccctgctcgtcaacgcagctgctgagcgcgccgtcgtcgtcgttcccgagcccggtgccgtcgtaccacgcgagcccggcgtcgtcgagctttccgagccccagccggatcgacaacccgagcgccttctgcctccttccgttccttcgggggctccccaacc

SEQ ID NO: 39967 - DNA, 365 bp, Oryza sativa
  Clone ID: uC-osroM202022h09b1
ttttcctccgtgccagctctgcgttaatcatcttcctcctcgctgtaccaatctcttgctgcgtttggggggagcaaagcgagcgagaggccgtgatggcggcggcggcggcggcggtgctgcacgcgctggtggcgctcagcctcgccggcgcggtcgcggcggcaggaagaggcggggagcagccgctgtcgaggatcggcatccaccggaccaccttcgcgatccagccgggtgcctccgtcgacgcctcgccgctcctactcggcctcgagggacaggacagagaatgggtgactcttacctataacaaccccaagccatcgaaagatgattggattggggtgttctctcctgcttatttc

SEQ ID NO: 39968 - DNA, 221 bp, Oryza sativa
  Clone ID: uC-osroM202022h12b1
gacagtgaaaggtacagcaattaagatcaatttggccaaacaagaaacacacgtacattaagattgaagactgactaggcaaaacaaaacaaactaataaaaggcatctactgtacacggggatgaacacatgaagaagaatatagggcgtgacggagacatggactacgatattcgtgagcggattatggttggagcttatttgtggaaacgtggttggc

SEQ ID NO: 39969 - DNA, 319 bp, Oryza sativa
  Clone ID: uC-osroM202023a06b1
tgggggttttttttttttttttggttttttttttttttttttttttttttttttttttttggcatcggggaagcaacacttcgatttagattaagcgccagaaaattagacacaaaatttgagccctggcccggcccaaccaacccccatgatccaacccagtttagttttagggtttgacgggcataaaaccctaccgaatttaaaatttttttttggaagggggttcatttacttttttttgggggaaaacacaactcccctgtatttggaggcccccatgaggggggcccgcctaaatggggctgggcatgggacg

SEQ ID NO: 39970 - DNA, 513 bp, Oryza sativa
  Clone ID: uC-osroM202023a07b1
ttctgctcagctagcaaaagtacaatatccgggggacggacgcctagctaagctaagctaattaagctctaatttctcttttcttttttcttcgatctccggcgaaaaagtaagtacaatggccgaggtgaacggagccaataacggcaacggccaccacggccacggcaacggcagcggcgctgcggcggcggcggggcggtcgacgagtgtgtcgaggaagatcgagtcggagggggcggtgctgatgcccggggtgtacgacgcgctgtcggcggcgatcgtccagaagaccgggttctacgccggcttcatctccggctacgccgtctccggctccttcctcggcacccccgacgtcggcctcctcacgccgccggagatggcggaagtggcgaggcggatctgcgcgtcggcgcccaacacactcttcatcgccgacgccgacactggtggtggcaatgctctgaatgtgaagcgtactgttcaggacctgattgcagcaggtgctgc

SEQ ID NO: 39971 - DNA, 512 bp, Oryza sativa
  Clone ID: uC-osroM202023a08b1
tttttaaccgatcagctttggtgttcgatcgagcaagacgaggcggcggcggggctgatcgagatggcggcgccgccggcgaggtcggtgagcgtggcggacagggcgctgcgaggggtggcggacctgatcaagctgctgccgagcggcacggtgttcctcttccagttcctcagcccgctcgtcaccaacaacggccactgcgccgccgcctacagcagggtcctcagcgccgccctcctcgcgctctgcggcgccttctgcgccttctcctccttcaccgacagctacgtcggctccgacggccgcgtctactacggcgtcgtcaccgccagggggctccgcacgttcgccgccgacccggacgccgtcgcgcgggacctgtccgggtacaggctccgcgccggggacttagttcacgccgggctcttgctcctcgttttcgccaccattagcctcctcgacgccgacaccgtggcgtgcctttacccggcgctcgaggtcagcgagcg

SEQ ID NO: 39972 - DNA, 475 bp, Oryza sativa
  unsure (1)..(475): unsure at all n locations
  Clone ID: uC-osroM202023b01b1
ctcttctccttgaatcctttaatttgctccgtttgttggcagtggccagccaatgatgatgggtggccagcagagcgcgctcaaccagctggtgtcgtttctcctcggggtttcggcggcggccgtgttgatcttcttcttctcgtcggccggcggcggctggtcgacgacgacggacttgtcgagctgggcgaatgggactgtagcggcgacggccaaggagaccaacctgacgagcaccgctgctcatgtcgaggagaaggctaacctgacgaacagccaggcggcggcggcggaggcggcgaaggaggaggaggagaaggagctggagaagctgctggcggcggtggccgacgagcacaagaacatcatcatgacgtcngtgaacgaggcgtgggcggcgccggggtcgctgctggacctgttcctggaggggttccgcgccggcgaggggatcgcgcgcttcgtcgaccac

SEQ ID NO: 39973 - DNA, 510 bp, Oryza sativa
  Clone ID: uC-osroM202023b06b1
gatgccgacacgaggtaagaagcccagaagccctagcgccgccgcagcagcagcagccatgggtatcgacctcgttgccggcgggaggaacaagaagacgaagcgcaccgcgccgaggtcggacgatgtctacctcaagctcctcgtcaagctgtaccgtttcctggtgaggagaaccaagagtaacttcaatgccgtgatcctcaagaggctcttcatgagcaagaccaaccgcccgccgctctccctgcgccgcctcgccaagttcatggaaggcaaggaggagaacaacattgctgtgattgttggtacagtcactgatgacaagaggatccaagagattccgaaaatgaaggttactgccctgaggttcacggagacggctagggcaaggattgtcaatgctggcggcgagtgcctcaccttcgaccagcttgctctccgtgctccgcttggggagaacacggtcctcttgaggggtcccaagaatgcccgtgaggccgtcaggca

SEQ ID NO: 39974 - DNA, 527 bp, Oryza sativa
  Clone ID: uC-osroM202023b09b1
gttccccaatcagaatccacgtatccacgagggcttagctacctgggtcaagaaggataggcccctggaggaaactgacattgttctctggtatgtgtttgggctcacccatatcccaaggctggaggactggcctgtcatgccagtggaacgcatcggcttcatgctcatgccacatgggttcttcaactgctcgccggcggtcgacgtgcctcccggctcctccgacgctgacatcaaggaagccgagtcgcccaaagccatccagaacggcctcatctcgaagctctgaagagctttccgctgctcttcgtttcgaagaaatgcaactgtggcatgtcactgctacgtatgcttctcgtcactatattgccccaaataaaagctactcccatggtgttattcctgtgttctgtactgttatgactttcctgctgcgctgtttgatttgtgaaatgtgtcctgttgcgccatttgatttgtgaacttgagccacgtctggtgaaattgggatggctgacgttatg

SEQ ID NO: 39975 - DNA, 86 bp, Oryza sativa
  Clone ID: uC-osroM202023b10b1
tgatcctacaacctccatttcctgccaatcggggggaaaccatataaacgaggggcttctcacccctccactacccggaaacatca

SEQ ID NO: 39976 - DNA, 520 bp, Oryza sativa
  Clone ID: uC-osroM202023b12b1
tccgatttccgatctctatataaaagacctaggatttcgaaatttgtgggtccccctcccccttcgcgcgcgcgctctcttcccgccctttttttttccttcttcttcaccggtgggattgattcgtggggtgcggatctggtttttgggggtgtgtatggcggcggcggaggcggcggcggaggcggcggcggcgctggaggggagcgagcccgtggacctggtcaagcacccctccggcatcatccccacgctccaaaacatcgtgtcgacggtcaatttggattgcaaattagacctcaaagctatagctttgcaagcacgcaatgcagaatataatccaaagcgttttgctgcagttatcatgagaataagagaaccgaaaactacagctctgatatttgcatcgggtaaaatggtatgtactggggcaaagagcgaacaacaatcaaagcttgcagcaagaaagtatgctcgtattatccaaaagcttggctttgctgctaagttaaggacttca

SEQ ID NO: 39977 - DNA, 529 bp, Oryza sativa
  Clone ID: uC-osroM202023c01b1
ccgcgtcgcgccgtcgatccgacgccgatgcgggggccggcgccggcgacgacggcaggcgcgggggggaaggtgacgccgaacctggcgatggacgcggaggggacgcggctgctcaacctcaccgtgctgcagcgcctcgaccccgccgtcgaggacatcctcatcaccgccgcccacgtcacgctctacgacttcaacatcgagctcaaccagtggagccggaaggacgtcgagggatcgctgttcgtggtgaagaggaacaagcagccgaggttccagttcatcgtcatgaacaggcgtaacaccgataatctcgtggaggatctattgagtgactttgaatttgaacttcagcctccgtatttgttataccgaaatgctgcacaagaagtaaacggtatttggttttataaccaacaagactgtgatgctggtgcaagtgtttttggaaggatattgaatgcttacgccaaagtgccttcaaaagcccaagtaccctccacaaaagtgaagttgaggaattgga

SEQ ID NO: 39978 - DNA, 449 bp, Oryza sativa
  unsure (1)..(449): unsure at all n locations
  Clone ID: uC-osroM202023c04b1
gccagaacgctgaccacagttcaattaaaatttttcagggcgcaccctgttaagaaggcccagtaactttacaatattaatattccctcaaggccagctaagttcaatcccggatttaaatatttctacgcatcgcttgaactacaaagagctagtagtacaatccagacttgttaccacactgacagccaagctgtgtaacgagccaaaggaatatatgaataaggacgcaccactgtttcatgtgcaagcaaaatgacggagatttaacccaaaaaacaatgtcggacagggaaagggcaaatgaccctggaagacttaaacctaggccacgtacatgaaatctncgaacggttgtttgggttgtgcaaatgtttaccgcgcggaatgattagcaccatttgacaatagcttgaccccatgtaagttcagcaccaaaacctgatgct

SEQ ID NO: 39979 - DNA, 288 bp, Oryza sativa
  Clone ID: uC-osroM202023c11b1
tgatgtagggaaatgggggtcgggaagaaacggggggataaacgtattccaggaaagggatacctgcacagttcggggacaacattacaagctgagaaatgcgagctgcgaagggcttaccaagaacattaagtgatggccaagagataagggctccatcattatgacatatcctggtgattgtggcgtgctcctctgatacatggataccaaaagacacccacggaatctggaataaatacatgctgaacagaccttgtgctctgtattgctgttcctgatcgcttt

SEQ ID NO: 39980 - DNA, 535 bp, Oryza sativa
  unsure (1)..(535): unsure at all n locations
  Clone ID: uC-osroM202023d03b1
cttcctccctccacccgtctcctccgtctccggcgccggcgccggcgagctcgccccccgcgattcgtgccctccgatcagaggcgaggcgggagaagagatggggctcacgttcaccaagctgttcagccggctcttcgccaagaaggagatgcggatcctgatggtgggtcttgacgcggccggaaagaccacaatcctctacaagctcaagctcggcgagatcgtcaccaccatccccaccatcggattcaatgttgaaaccgtggagtacaagaacatcagcttcaccgtctgggatgtggggggtcaggacaagatcaggcctctgtggaggcattatttccagaacacccagggtctcatctttgttgtggacagcaatgatagggaccgtgttgtcgaagccagtgatgagctccacaggatgctgaacgaggatgagctacgtgatgctgtgctgcttgtctttgctaacaagcaagatctgcccaacgctatgaatgctgctgagatcactgataagctnggactg

SEQ ID NO: 39981 - DNA, 462 bp, Oryza sativa
  Clone ID: uC-osroM202023d04b1
gctagagtgcgttgcgttgcgagcgggaagcgaaaactcgaaaccatggccacggccggcgacgagcagcagcagcaggcggcggcggcgcagacggcggaggtgacggaggcggcggcgaaggaggtggtgtccgtggagatgccggcgccggaggggtggacgaagaagtttactccccagagaggggggagatttgagattgtttttgtttcaccaactggagaagagattaagaacaagagacagctgagccagtatctgaaggcacaccctggaggccctgcatcctcagagtttgattggggaactggtgatactccaaggcgctctgctcgcattagcgagaaagttaaggctttcgatagcccagaaggggagaagatcccgaaacgttctaggaactcatctggcagaaagggcaagcaggagaaaaaggaggccaccgaaaatgaagaagcg

SEQ ID NO: 39982 - DNA, 436 bp, Oryza sativa
  Clone ID: uC-osroM202023d10b1
gtagtatatatgtattttatttacatctcacacctccaaaatcttattctactacagtaaactgggtacagagatataataatactcatacaagtatgtacaacaacaagcacaccacacactgatcaacttttccttggattttttgctctgcagcaaaacaccaaggcaaaagcttaccactgctcatatgtatctcctcatactgaattatactaagtagtagtagtaactacatggctgcagtagctatatgcagaccaaatctcgtcaaaattaaaatcctaatatccaagaagaaaacaagaaggagtaacaaatcgaatgaaggtgtgcagtgcaggtaggaggaaggtagcaatcaacggtgactcaaacacacccaagagcatgaaagatgacgacgaagaggagctagctcgagctcgagctcgag

SEQ ID NO: 39983 - DNA, 487 bp, Oryza sativa
  Clone ID: uC-osroM202023e01b1
cgcagccgaaggaatcctcgacggcgacgacgatggccgccgcgacggagaagacggccgaggagatccgccgcgagctccaggagctccagcgccagcaccgcgagatcagcgagcgcctccgagacccccgcggcctccgccgcggcgcgcccgccgctgcaggacccggcgggccccgcccacttcgcggattccctagaccagctgtggatttggtggaccagtctgcgcctaagcggaggattctatctgcagtggttaaagtggaggatactgaagctaaggaggatgtcaagaaggaagcggaggcagaggggccggagggcggttcggctgctgctgaaggcggtgagaggagggatggtgggttcaggagggatgggagccagcgcatgccgaggagggtgagtaggctggaactataagggattgcgggttgagtttgcttaactgtattggtttggctgcaggagtttgatatgtc

SEQ ID NO: 39984 - DNA, 422 bp, Oryza sativa
  Clone ID: uC-osroM202023e02b1
ctcacccaaaaaaaaaaaaaccaaccaatcaaaaaccaaaccatggcgcgccaccgccaccgcctcgccgccggcgcggcgctcctcctcctcctcctctcctccgccgccgcgctgtcgtcatcggcggcggagggggaggaggacccgctcatcgagcaggtggtcggcggcggggaggaggaggacgcgcagctggacgcggaggcgcacttcgcgagcttcgagcggcggttcgggcggacgtaccgggacgccggcgagcgcgcgtaccggatgtccgtgttcgccgccaacctccgccgcgcgcggcggcaccagcggctggaccccaccgcgacgcacggcgtcaccaagttctccgacctcaccccgggcgagttccgcgaccgcttcctcggcctccgccgcccatccctgga

SEQ ID NO: 39985 - DNA, 431 bp, Oryza sativa
  Clone ID: uC-osroM202023e07b1
tgtcttctcctccccctcccggttcggttcgggtcggttcgggtccggttcgatttcggtttttccttcggttcgggggttggtgggaaagcatggcggcgccggatgttgagtaccgctgcttcgtcggcggcctcgcctgggccaccgacgaccgctccctcgaagccgccttctccacctacggcgagatcctcgagtccaagatcatcaacgatcgggagacggggaggtcgcgcgggttcgggttcgtgacgttctcgagcgagcaggccatgcgcgacgccatcgaggggatgaacggcaaggagctcgacggccgcaacatcaccgtcaacgaggcccagtcgcgccgctcccgatgcggaagcggcggtggctaccgccagccgcgcggatgcggaggctactgtggcggcggctaccgtggt

SEQ ID NO: 39986 - DNA, 412 bp, Oryza sativa
  Clone ID: uC-osroM202023e09b1
tggggtggttttttttttttttgggggtttttttttttttttttttttttttttttttttttttttttttccccccggccaaaaaaaaatttattgggggggggaaccaaaaatacaaaaacggaattttctcaaaattaaacccgggggcccaagggggaaaaaaaaattatttatgggggcgggaaaggaaaagttccgggggaaacccaaattccttggaaaaaccccaaaaaaaaagggccccgcctattgccggtattgcggaagggttggggactgaaaaaaaagccaaaagaggggggggggggggaccccccccccccaaatggaattggccaaaggggaaatcaaagggggcccctggaggttttggggaggccgggaaagacctttcccggggggggggggg

SEQ ID NO: 39987 - DNA, 502 bp, Oryza sativa
  Clone ID: uC-osroM202023e10b1
tctccagcaccagcagcaagcttcttcttcaggaactcagcagcacttcacctgctgctgctgcgaccgccgtgaccatcaccacctcgtcgccggcgagaaacctgcagagggcgagggcgagtgcggcggagcaggggatggaggagcatggcaaggcggctgtcggctgggcggccagggacgactccggcgtcctctccccgtacaacttctccaggagggctcagaaggacgatgacgtcaccatcaaggtgctctactgcggcatctgccacactgacctgcatatcgtcaagaatgattggggcaacgccatgtaccccgtcgtccccggccacgagatcgtcggcgtcgtcaccggcgtcggcgccggcgtgaccaagttcaaggccggcgacacggtgggcgtgggctacttcgtcgcgtcatgccgcggctgcgagtgctgcgggaatgggtacgagaactactgcgccaagatggtaaccacctgccacgg

SEQ ID NO: 39988 - DNA, 391 bp, Oryza sativa
  Clone ID: uC-osroM202023f02b1
gtaaaacaaaataatttactttagtcccccaacttatacaaatttacagcaccaaaagtttcagaaagctgcgtgccaggccatgcggaactgcaggttatggcaaccgcagaagctgaaacagcaacagtaacatcaagttaactacaaagaaccgtaaaatagtatcatcaccatgttcatctagacatagtagaaaacattcacactctcgaaatgctctctatctttcagttttgtgttgctatacgtcttcttgttttgcatttttttttagtattccatttctgttcagcagagtggcagtggcgcgccattccattccttgaggcattcgagcagcgggtcgatgtgcttgcgctcgttgatggcgacgagcaccttgttcagc

SEQ ID NO: 39989 - DNA, 449 bp, Oryza sativa
  Clone ID: uC-osroM202023f07b1
ttttgattatttgctttctagagtagaaattgtgggaactaggtgtacaatttctagagagtagttgatctatttgctttctagagtggagaaattgtttgaactaggtgtacaacttttagagtgagtacttgatttatttgttttgatgttttctagagtagagaaattgtttgaactatgtagacatgtgaaacattgaaagcctatttggaagatctggcccaattttttgtttgtttggatggcataactgtgatttgttctgcaaccctgccatgcgtatgcgattttgggggaaagtacattgagaaatctctttctggatcactatgattttttgtctccaaaatgttttgatggagcttttgattgtctctaatgttctagtggtgacatcagaggtttgttctgtttgttaaaaaaaaatcggtaatgatgagttcagc

SEQ ID NO: 39990 - DNA, 143 bp, Oryza sativa
  Clone ID: uC-osroM202023f08b1
tttttttggaaacaaggatgctacaatatattattgcagaaacggcaccaaggccgtttctattattcataggtaacatcccaataacaagaggagacagagcaccaaccacacaccacattccactgaactcacccccaact

SEQ ID NO: 39991 - DNA, 531 bp, Oryza sativa
  unsure (1)..(531): unsure at all n locations
  Clone ID: uC-osroM202023f10b1
tgtgtgaggagctcgcgaactccaaaaccctaaccctctcggagcttcacatcggcggcggcggcggccatggcggagggtggcggcggaggaggagggtcggcggcgtcggcggcgctgaaggatcaggggaacgagcagttcaaggcggggaactacctcaaggccgccgcgctctacacccaggccatcaagctcgaccccgacaaccccaccctctatagcaatcgggctgctgcatttctccatctagttaagcttaataaggcactcgctgatgctgatacgacaataaaactcaagccacaatgggaaaagggtcatttcaggaaagggtgtgttttagagtcgatggaacactatgaggaggcaatatcttcttttcagatagctttgcaacacaatccacaaaatacagaagtttcaagaaaaattaagaggcttactcagctggcangggaaaagaagcgggctcttgatgtggagaacatgcgttctaatgttgatgttgcaaagaacttgattcactga

SEQ ID NO: 39992 - DNA, 388 bp, Oryza sativa
  Clone ID: uC-osroM202023g01b1
tttttggtgttttttttttttttttataccaacagaattgattgatctctctcatagaggaggaagaacttgcaagggaggtaggtaccaacaaattaattaacaaaaaagcattgaaaaatatctggaataaggcaaaaaagagaaaaaaagggagaggaaataaacaagagaaagggagacgggagaatttcgcaaaaggatctaagcccgcgcgtctgtgctgtgcatgcatccatccatgcatgcgatgtgatgcgtagctgcgcctgcatggctcgctctggacgccgcgtgcgccgcttgatcagcacacgccgtagtcgcggaacatgagctccggcctcccggtcgccgcggcggatcccgcggcggcggcggcggcggc

SEQ ID NO: 39993 - DNA, 310 bp, Oryza sativa
  Clone ID: uC-osroM202023g03b1
gtgagaagaaaaaaacaactttggggggtgaactccgcgagccagcgcacgccatggaaaacattttctgacctggcggccaacgtttagagtggagacttgatctatttgtttcgatgctgacacagccgggcagattgtctgaccttgtagacatgtgaaacattgaaagcctatttggaagatctggcccaattttttgcttggttggatggcataactgtgatttggtctgcaaccctgccatgcgtatgcgactttggggggaaggacattggagaaatctctttctggatcactatgatttttt

SEQ ID NO: 39994 - DNA, 546 bp, Oryza sativa
  Clone ID: uC-osroM202023g06b1
tctcaccacggcgaacttccagcctctgccgccgcggcttccgcgccgtccgctcggcagtggcgccgccgcctcgccgcgcaatggcccccgacgtgctactgcgcctcgccccctcgccgccgtatgcccagaacccgccgccccggcggcggagccccgcctcggcatgcggcgcctcgcgccgcgacttcgccatccacaccgccatcgcctccgcctccgccgcggccgcggtctccgttcgtccggccaccgccgtcgtcgccgacgaggaggcgccaccgggggagccttcccaaaataagaagggctcccctctgctgggcggcatcgcgaacaccaagtcgtggtcgcagtactacggcagcggcttctccatccgcgttcccccttccttcgacgacatcttggagcccgaggagtgcaacgtcgggatgacctactacggctacacggcgaagcccaggacatacgctgctcgcttcgcgtctccggacaggtaggccatagatataacagacctgggcactctaaaggaggcat

SEQ ID NO: 39995 - DNA, 340 bp, Oryza sativa
  Clone ID: uC-osroM202023h01b1
actttttggggggtaatttaaatgtgtaggggatatgtactttatttacatttgacaccttcaaaatcttattctatttcagtaaactgggtccagagatatactatatctgatacaagtatgttcatcaacatgcccactacacactgatcaactcttccttggatcttttgctctgtggcaaaacactcaaggcaaaagcttaccactgccgatatgcatctctctatactgaattatactaagctagagtggtaacttacacggctgctctatgctttatgccatactaaattctcttcaaatttaaaattctgtatctccaatcagaaaacaagaa

SEQ ID NO: 39996 - DNA, 473 bp, Oryza sativa
  Clone ID: uC-osroM202023h09b1
tggtttaggatcttaattggtgatgatgaacactgctggagtgataatggtatctctaacattgagggcggctgctatgctaagtgcatagatctttctcaggagaaagaacctgacatttgggatgcaatcaagtttggcacagtgttggagaatgttgttttcgatgagcactcccgtgaagttgattatacagaaaaatctgtcacagagaatacccgtgctgcttaccctattgaatacatagctaatgctaagataccatgtgttgggccacacccaaagaatgttatcctacttgcatgtgatgcatttggtgtcctccctcctgtcagcaagttgagccatgcacaaaccatgtaccattttatcagtggctacactgcattggtcgctggaactgaagatggtatcaaggaaccacaggctacattttctgccttgtttggtgcagcttttataatgctccaccc

SEQ ID NO: 39997 - DNA, 467 bp, Oryza sativa
  Clone ID: uC-osroM202023h10b1
tacctcccaaaacacccacccggtttaccagagatccgcgcccgccacttgtaaacctgctgcacccatggcgcccagagcagctacggtggagaaggttgctgtggcgccacccaccgggcttggtcttggcgtcggcggaggtgtcggagccgggggtcctcactacaggggcgtccgcaagcgcccgtgggggcgttacgcagcggagatccgtgaccctgccaagaagagccgggtgtggctcggtacctacgacacggcagaggaggccgtccgcgcctacgacgccgccgctcgagagttccggggtgccaaggcaaaaacaaactttccgtttgcatcacagtcgatggtcggctgtggcggcagccccagcagcaatagcacggtagacaccggtggcggcggagttcagacgcctatgcgggccatgcctctgccgccgactctggacttggatttgt

SEQ ID NO: 39998 - DNA, 398 bp, Oryza sativa
  Clone ID: uC-osroM202024a01a1
cagctcaactgcacaaactggtccttgttttcaacaacactccaacagtcatgctgatacaggtagcaatgcatagcggatttacagccaaacccagacagtactagcataagcacaacgcatgtgccaaaatttattcttgttcatagagcggaaaccgcttctttattacattgcactggcattactacataaggtttgcgctttgcctcctagcacaaaacttgggccatctctcatcttcactggagttccttcaggaagtcggcgttatcaaccaaaaccactttccagccatcagggtcaaggaaagaggcaatctttgtgttgagccctggtagtggacctggctgccgcaaaatctttccccctagttcttttgtaaccaacttaacagc

SEQ ID NO: 39999 - DNA, 134 bp, Oryza sativa
  Clone ID: uC-osroM202024a01b1
ttgttgactcaaacacaacataacgtagaacgttacatttccaatatcaaatcaccatccgctccatcctccatgaccagggccacggcgggcgccggcgacatctgcatcgtgggcagctgcatatcccgatc

SEQ ID NO: 40000 - DNA, 411 bp, Oryza sativa
  Clone ID: uC-osroM202024a02a1
tttgtgtttttttttttttttgggttttttttttattttttttttcttttttttttttttttttttttttttacattttttctgtttctttttttttttttttttttttctgcggggaaacaaaccccgggggaaccttccccaaaaagggggaaaacagcaatttttgctcaaaaaggggaaaaccaaaaacttggggggggccctgccaaaaccaaaaaaagaaaaaattccagcctcaaaaaaactacaaagaaaaccggggaaagaaaccccggtggacaaaaaaaaagggggggggaaagaaaaaaaaacccccaggaaaaaaaaaaacgggaaaaaaaaacgcttgaaatcggaggcgtcaagggccctaaaaaccaaaaagggggttaagaacaattaaaaaca

SEQ ID NO: 40001 - DNA, 397 bp, Oryza sativa
  Clone ID: uC-osroM202024a03a1
tttttgttttttttttttacgacaagaagggaagtcatataattcaattgaatttttggttgctataacatacaaaaggtgcaactgtaattatctagtttgcagtaactaagttcaccaaaatgctgtggccagtatatataccaaaaaagaaatacattttggcctttttttaacatacaacacacacacacatattagctttcctcagagagacatcttctcttctatgcaaccgtggaactgaatgaacaaatgatctgttgcagtgcacaccatggaacctgacaacttgaagctcaccgaatttcttggtttcactcatcatgcataagccagcaaagtagccaacacaatctaaaataccaaaaccgagagtgccaatggttgttttgtc

SEQ ID NO: 40002 - DNA, 367 bp, Oryza sativa
  Clone ID: uC-osroM202024a04a1
aataaagaaagtaaatattccaggagtgtctccctctcccagctagcccaggaagcagcacagcctaacagctacaaaaatttccaaacatagttgcatacggaaaagagaaaaacatggaagccgtccttaaccacaattcaaatagaccccgtccttaccactcctcccaaacgagaaagttggtcatattaaaacaaaaacaaaaacaaacttttatccagaaccttacttcctaagacataatctagagaaggtcagcgacgttggccggcagctcctcgatggtcacattgtagaacctctggatgtcgaacagcatccttttattatcgcgggtgacaaagttaatgggaacttcctttct

SEQ ID NO: 40003 - DNA, 268 bp, Oryza sativa
  Clone ID: uC-osroM202024a05a1
ttgttgttttttttttttttggggtttttttttttttttttttttacataaaagaaaaacggaaaaggaaaacaaaccaaggggaaggacaaaaaaacaaaaaaaccaagccacaccagaacgcacccggaaccccagggccaaagggaaagggaaggcgggggaccaagaaccataaaccaaaaagggaaaacgggggaaagggcaaaaaacccaaccaaaaaaagaaatcaaaaacaggatggaacaaacccggggtggggggggg

SEQ ID NO: 40004 - DNA, 500 bp, Oryza sativa
  Clone ID: uC-osroM202024a05b1
cttcttcttcctcctctcccctctcgccgtgctggtggtgagtgaggcggcgagcggcgagctcctccggtgatccgaggctcgccggccggcgagagcttgcctgtttcgggaggttttcagggtgatctgagagcacagcgagccgatggcggcggcggcgaacggggcggcgtgctgcggtggcgcgacggggccagggtacgcgacgccgctggaggccatggagaagggcccgagggagaagcttctttacgtcacctgcgtatacaacggtactggaattaacaagccggattacctgggtacggtggacgaggaccccaatttccctacatactcccaagtgatccacaggctcccagtcacccatgttggcgatgagctgcttcactctggatggaacgcttgcagtttttgccatggtgaaccatcggctagccgccgttttttgaatttgccttccttgctgtctggccgtgtgtatgtcgttgacacgc

SEQ ID NO: 40005 - DNA, 323 bp, Oryza sativa
  Clone ID: uC-osroM202024a06a1
tcgacggccttgtcggggtcggagccgacgatgagcgtcgccgcgccgtcgccgaacagcgcctgcccgaccatggagtcgaggtgggactcggagggcccccggaacgtcaccgccgtgatctcggagcacacggcgaggacgcgcgcgccgcggttgttctcggcgaggttcttggcgacgcggagcaccgtgccgccggagaaggacccctgctgggacatcatgaggcggatcacgttggggctcaagccgagcatattggcgagctggtagtcggttgcgggcatggggacccccgccgtggtgcataagacgaggcg

SEQ ID NO: 40006 - DNA, 397 bp, Oryza sativa
  Clone ID: uC-osroM202024a07a1
agactgaaaacattcacaaatcgctatatttttttcccagaacgaagcatcaaccttaaaatgcaaaatatcacgcataagcaagcaggagactccttgttgcttgcttgcttggtcttttcagcttccttttcttctacttggtccccacacagccactcctttttttccccggggattaaaaccgaggggttctcacggtcgcggcatgaggcctcgacggcgatggcctctacggccttgggggtcgcatcgtcgtgtcgacgtccagggcattgacgacaccaatccaggcaacgaggagcccgcgtcatatcgtcgccatcttgacgcagctccgggctcaaccctggagcatcgccgcgccccacatgcggagctccggcccaaacacgcg

SEQ ID NO: 40007 - DNA, 375 bp, Oryza sativa
  Clone ID: uC-osroM202024a08a1
aaaaacaatccaacagagcatttgggtgacatttcatggtacacatctcacgggctaatgaaatactcgagaaaatccgtatccaatctttgcgaaaagaaaacaaagatgttcttgacatgccatcgggagatttgctagatagctagagaactacaaagtccaaacacagacaggctaagaaaagttttctttgaagggaacgagcaaatgctggccagcactgtccggggctggggctattattctttggaataaaagactggggcatggcctggccctcatcatagaatgtgttcaaacattcggaggaggccagaacttcccgaagagttcctccactcggggggcttggttaacatatccttccaaccc

SEQ ID NO: 40008 - DNA, 481 bp, Oryza sativa
  Clone ID: uC-osroM202024a08b1
ttgtcttcgtactcgcctctctccgcgccctcctccgccgccgctcgccgccgttcgtctccgccgccaccgccgccgccatgagggagtgcatctcgatccacatcgggcaggccggtatccaggtcgggaacgcgtgctgggagctctattgcctcgagcatggcatccagcctgatggacagatgcccggtgacaagaccgttgggggaggtgatgatgcttttaacaccttcttcagtgagactggtgctgggaagcatgtcccccgtgctgtcttcgtcgatcttgagcctaccgtgattgatgaggtgaggactggtgactaccgccagctcttccaccctgagcagctcatcagtggcaaggaggatgcagccaacaactttgcccgtggtcactacaccattggcaaggagattgttgatctgtgccttgaccgcatcaggaagcttgccgacaactgcactggtctcagggc

SEQ ID NO: 40009 - DNA, 462 bp, Oryza sativa
  Clone ID: uC-osroM202024a09a1
ttgtttttttttgaagtgataatttaaatacttaatagtaatagactctttgatggagtattacaacatgcagcagtggcattaatacgccagtacattaattaagttacacatatgcaggctccattttggtttcttttaatttatcgtattacagaatttctgtagccttgcagatgatcacttggatatcatgtactagtaattaacaataggatgcatacaaaagatggcccaacgacaacagaagatgcgtgcatctgacattgtctggccttatttgttggtagtactccaattaattaacaagagatgatgcattcttgtgccttagtttcttcacatgcttggcttcacgttgagcctattcgcaatcttcacccccaacgactcatcacactgggagaggtagttgacccagatggcgcggagctcaggggagaccttggggtgcgcgagctc

SEQ ID NO: 40010 - DNA, 478 bp, Oryza sativa
  Clone ID: uC-osroM202024a09b1
ttattaacaaaaaaaaaaccctcctcgcctaccccccaccgacgtgtgggccccactcccccggccccacccgtcatacaccccgggtgtacggacccccgccggaatcccgcaccgccggcgatatatagtaggggagctcgaggcagctagattttttttttctccccatcgagattcgcgtggccttgtggtcaccgtcgccgccgccgcctagatctctcgctgcgtctctccctccctcccctccggcgatccgcgtagatctgggcgggaggcggcggagatccgcggcgaggaggggagggaggggaagcaagcaagcaaagcggaggggcatggagctggcggtgggagcgggcgggatgcggaggtcggcgtcgcacacttcgctgtcggagttggacgacttcgacctgtcggggctgctgaacaagccgcggatcaacctccagcggcaacgctcgttcgacgaccg

SEQ ID NO: 40011 - DNA, 364 bp, Oryza sativa
  Clone ID: uC-osroM202024a10a1
tgtttttcttttacattggtataattgatttaggcgagtacacaggctacaaacaaaagtataaagagttctccaaaagcggtaatgatacaaatagcccagccccgtatgacgattctagtaacacaatatttcaggtgaacaacaaaggtgtatcagaatttattggaacccaaattccacaatgaactgcgacacaaataatggtgaaacccaactattaagtatgctccagtgacatttttcgccaaatgcgatgcagcagcttaggcctggctctttttgggcacttggaggcgcttccggaaatcattttccatgagcaccaagccatcacgccaaacgatcttgggtttccacccca

SEQ ID NO: 40012 - DNA, 298 bp, Oryza sativa
  Clone ID: uC-osroM202024a11a1
ggttggtttttttatttttgggtttttttaagctaattttgcattcttttatggcttcatctataaaggattacaatcaggaggtgtacaaaacaacatacagacaatgctactttctctttgaacaattagctgttttgcaaaggaaacaatcagcatataatcatggagtcccgcaaacatcagggattagcctcccttgcctacaaaatttgtacagctaaagatatctgtttgagcttgcaacatcctggtggtaaaactttattcactcagccaaactggaagcacttttcaa

SEQ ID NO: 40013 - DNA, 85 bp, Oryza sativa
  Clone ID: uC-osroM202024a12a1
aggaggttttttgaattcagggggcgataataattttccaagaggctacttctgaccgaccatgaagtgtaagcggaaatcaaaa

SEQ ID NO: 40014 - DNA, 390 bp, Oryza sativa
  Clone ID: uC-osroM202024b01a1
aagcaacagtgcatttggatattcagaaactgctttacaaccatggattaataatacagattctgattggtgccattaagtttcacatttcacacactacacatcagatgacccccgggcatggcatatatgttctcttttggctgatatagctgagtgatcaaaaggatttgcatccaccagtctgaaacattccggttcggaccataagcacatcaccagcacaaacacagaaaagcatttccgcgtgctttcggaagcttttgatagtgtcaggtatatggccggacagatccccatcatatgcactgcgccaccttttgatacaaatcctgtggccagttcctgctcatgttgcttgccacgaggtttgcgatctttgacttgact

SEQ ID NO: 40015 - DNA, 471 bp, Oryza sativa
  Clone ID: uC-osroM202024b02a1
acacatggaagatgtttacacacaaacacacttctttgggttgtcgctagcccttgataggagccagcaggctagctgacacgtaccggtctctggtagtactaacagagacagcaagctactaggaacagagtaacaagataagatagcaacatactagataattaattacgtattagataaccacaaggaccagcaaacatggcgtgacagagagatcgaccagcctccgatcaatgggattattcagttcagcgatggctgctcctggtctcgtcgctgtacagccagtcgtagacggtgggggagttgggctgggggcggtcgaagaggttggcgccgaggctcttggtggcgaggttgctccccgggtggaacacgctcctccacacgttgctgccccgcggcgtcgtcgtcgtcgccgtcgtcggggacgaagacgacggcgtcaccggcgtcgtcggggtcgtc

SEQ ID NO: 40016 - DNA, 297 bp, Oryza sativa
  Clone ID: uC-osroM202024b03a1
gaaaggaaactcacccgttttattacttgttccattaaacccataacactaaggtacggggtgaaacccggaaagttaaaaaacaaaaactgcattagaagagtgaggccctgcttgctgttccatgagaggtgcacaaaaacccagcgcacgagcagggcatccaggccacacgcaagatggaaacggatgggatgccgacgccgccgacggtcgatcctccgcccggtgatgattgcggcgaagacatcgttcagagtgcacgcagaggcggagcggcgtgcgtcgcggctcggt

SEQ ID NO: 40017 - DNA, 359 bp, Oryza sativa
  Clone ID: uC-osroM202024b04a1
ctgaggatagctcggtggatttttattgtatactgaatacatcaacaatattacaatcttctaaaatcctcccataatatgaatctcaagaattgaacgaatgaccataagcgctatattacatataacttctgtgagtgagcaattgaaagcccttgatgatgaacattcctaagaatatatccacctaagtttttaagttttcagccaatagatgctacagggtaaattctcttcacaaaaccatggcctgagggggtccgtagccgctccggtgcttcttctgccatgtccaggcaaccctgaggctctccaggagatcggtatgttgagcagtccagttcagctcgctgttgatc

SEQ ID NO: 40018 - DNA, 377 bp, Oryza sativa
  Clone ID: uC-osroM202024b05a1
ttgtggtttttttttttttggggtttttttttttttttttttttttttttttttttttatttattacgttttttatattttattattacttatatcattaatttaccggttgattattaaaaaaaaaaccccctaaaaaagaccccccgaaaaaaaaaagacacaagaaaaaaaacctttccaccccggggggaaaaaaataagggggggaacaaaagggggaggcaaaaaaaaaaaaccccaaaagggggacttcccaaccgggggggggctggggggtaaaaacccccccaaaaaaagggccccccccccaaaaaaaaaaaaagggggggaaagacctgggcttagaacgggcccccccgcccggggggtggggg

SEQ ID NO: 40019 - DNA, 318 bp, Oryza sativa
  Clone ID: uC-osroM202024b06a1
gaacacataaaagacgcttttcaatagcatataaggtccagaataaagttgcacatggagcagctcgcaacataacatgaataaaccggataaatattggacacccaatgaactacatatgagaataggaacccatcaggtcatcttggagatgatcctcccatcgctgctctgaacattttaagggcgtaaaccttcgcaggaatcataactattatactatcaaagaagcaaatcatcgcctgtattgtcctgccctatcactggacaactcatcatcgatttcgatgctgtccaagcacatcaggttgttgttga

SEQ ID NO: 40020 - DNA, 183 bp, Oryza sativa
  Clone ID: uC-osroM202024b07a1
gaaaggaaaggggggcccccaggggcgattgatcgccccttagcattgcctctattgaagaaccattgaccaacaacaactgactccaattacaacccggtcgatggaccctttaaaacaaaacatccgaacttacggatcattcaattcgacagccgactaattggacccaatgccctaaga

SEQ ID NO: 40021 - DNA, 426 bp, Oryza sativa
  Clone ID: uC-osroM202024b08a1
accacaaaacaacacatgcatatcaatgaggaagtaacaaaaacaatatgccatgtacatgttgttcacctcacaccaagttggtgaaacaattacaaagtttatggaaacttgaactacacactgcctgcctatatttacaagcgtccttaagaacacaacctttgaatgaatcgttcatacaaaattacagatggttcactaaacccattgcaatatcctacacctcacataaattccttacaaaaatacatattgtacaagaattacatgctctaaggtgaatcaattttatgattttggtgattcagactttgtgtgcccaggtttacctatgatggctttcttcacttttgctagttgatgctttacctttgatccaacaccagacaaaatgttatgttttttatgggataccttctgttc

SEQ ID NO: 40022 - DNA, 465 bp, Oryza sativa
  Clone ID: uC-osroM202024b08b1
tttcaacaatggcgaggagcgtagccgtggtggtgttgctggcgatggcggcggtggcggcggcgcaggcgccgggtcccgctgcgacgccggcggcgggcgccacggggccgccgaacgtgacggcggtcctggagaagggagggcagtacacgacgttcatccggctgatgaaggagacgcagcaggacacgcagctgaacagccagctgaacaactccttcaacggcaacggctacaccgtgttcgcgcctaccgacaacgccttcaacaacctcaagccgggcaccctcaacagcctgacgcagcagcagcaggtggcgctcgtccagggccacgtcctcccgcagttctactccatggactccttccagacggccagcaaccccgtccgcacccaggcgtccggcaccgacggcccctacaccctcaacatcacctccaccaccaacaacaacgtcaacg

SEQ ID NO: 40023 - DNA, 79 bp, Oryza sativa
  Clone ID: uC-osroM202024b09a1
taggttttttattttttgacggttctttttactcctaccattttttttttttttaaaaaaatatcctctattcaaaaac

SEQ ID NO: 40024 - DNA, 365 bp, Oryza sativa
  Clone ID: uC-osroM202024b10a1
ttgttttttttttttttttttttttttttccccttgagttgggattcttactatgaacatactacgtccaaaccgagataaatatacacgtttaacagaatatttaaaccgagagaaatcagaaattagaaagagaattcacatcaacattgacacggggggttttggggctgcaccaatcacgaagcacccaagcacgaattttggagcgccgatgcctcaacgcatttgagaaaccgttccaagctcgccgccgacaacccggccggagcagcgtgggcgcaccgccctttacctcccagacgcttgttccctccctgccgccgttaccgccgatggccttggcgagcgcggccgggatggcg

SEQ ID NO: 40025 - DNA, 443 bp, Oryza sativa
  Clone ID: uC-osroM202024b10b1
ttcgtccgttcaagtactcccaggtcaacaaggccaaaagggccagtgagtggctagcttaattagctaagctcatagtcatagcaatggctggagccgtgctggtgaggagaatggtggtggtggttgccattgccgccttggtggcgcccggcgaggtggcggcgcagctgacgccgacgtactacgacggcagctgcccgagcctgcagtccatcgtgaggtcggccatggcggccgccgtgcagcaagagccccgcatgggcgcctccatcctccgcctcttcttccacgactgcttcgtcaatgggtgcgacgcgtcggtgctgcttggacgactcgtcgacgatcaccggcgagaagaacgccgggccgaacgccaactcgctggcggattcgagggcattgactccatcaagtcgcaggtcgaggccgccctgccc

SEQ ID NO: 40026 - DNA, 245 bp, Oryza sativa
  Clone ID: uC-osroM202024b11a1
ttggtttttttttttttttgggttttttttttttttttttttttttttttttttttatctttaaaaaaatggaaggataaattaaaaaaaacaaaagacagcaaaaggcctatattcaaaggaaactaacccaaaccccctttttaaaaacaaaccggcaaacatgcgggccccaaatgaacagttaactgggggccttggctacaaaatttattcagcaaaggggccgaggtttaggttccaaa

SEQ ID NO: 40027 - DNA, 371 bp, Oryza sativa
  Clone ID: uC-osroM202024b11b1
cccattttccgttcgaagaaggaaaaaaaaaggaggaaaagaaaagaggaggaaagcgaagaggttggagagagacgctcgtctccacgtcgccgccatggccgcccgcgccgccgccgccgcgttcctgctgctgctcatcgtcggcgcggccaccgcggcgccggacatgtcgatcatctcctacaacgcggagcacggggcgcgggggctggaggaggggcccacggaggccgaggcgcgcgccgtgtacgacctctggctcgccgagaacggctgcggttcggcccaacgcgctcggcggtgagcacgagcgccgggttcttcgtgttcttgggacaaccttcaagttcgttgacgcccacaacggc

SEQ ID NO: 40028 - DNA, 213 bp, Oryza sativa
  Clone ID: uC-osroM202024b12a1
acaaccttaaggggcccggattttggtggcaggaacacttccaaaagggtgaacaatggtttactggttcccggatggaaattaccctgtttaaaacttcccacagggaccaccttttgttacaaaagaaatcatgtaaacaggtgttcaaaaagggattccctttaaccctccacctagggagggagctcaaatgaaccgtcccctaaacaa

SEQ ID NO: 40029 - DNA, 411 bp, Oryza sativa
  Clone ID: uC-osroM202024b12b1
ttttgtccgttccactccatttctgagctcttctagtttgagtgagagagcagcagaagggagtagtgcaagatgccgatccgcaacatcgccgtggggagccaccaggaggtgtaccacccgggtgcactcaaggcggcgttggccgagttcatctccaccctcatcttcgtcttcgccggccagggctccggcatggccttcagcaagctgaccggcggcggagcgacgacccccgccgggctgatcgcggcggcggtggcccacgccttcgccctgttcgtggcggtgtccgtcggcgccaacatcttcggcggccacgtgaacccggccgtgaccttcggcgccttcgtcggcggcaacatcaccctgttccgcggcctcctctactggatcgcccaacttctgggc

SEQ ID NO: 40030 - DNA, 437 bp, Oryza sativa
  Clone ID: uC-osroM202024c01a1
ggggaaaacccccaatgggccggccccaacaaacccaagcggggggggaaaggggagacccccccggcacctttaccggggttttcccgccccaattttaccccccccggggccccccccaactttggacccggggcttaacgaacgaaccccaaatggggtggagagaaagaccccccctacccctgtcccgaaaagggggaaccggggggaaaacccccccccccatgggatcccccccccccgggggccggcaccccccagggcccccctttttggggggggggggggggacccccccagcccccccctttttggggggaagggggaccccaaggatggcccgggcccctaagggggaaagctttgatgggcaaaaagcccccccgggtcaccccccggctcagcttaagccccggggggggccccggggcccc

SEQ ID NO: 40031 - DNA, 437 bp, Oryza sativa
  Clone ID: uC-osroM202024c01b1
gaacgctggcacgcccgcgggcaccggtccgggatcgccgcacgccccgtcttcattttattcacgcgattgacgcgagcgagggacgacgactccgacgatcttactccggcgaggcgagacgacggcgactgccgaccggcgagttcgctccatcttccccagagaaccccctcattctccctccggcgagctttcttcgacggagaagacgagacgcggacgagcgacctccctccggcgacgacaacagcctactccggcgagccccctcctccctacggtgagtccccttctcctccctccggtgagccgctaccgcctcgccgcgcgcccttgtccgccgtccaccgtcggtccgtcgactaccaagaccattctttttaggccccgatcccccacttttcccctccaaggcgccacccttccccccaacc

SEQ ID NO: 40032 - DNA, 327 bp, Oryza sativa
  Clone ID: uC-osroM202024c02a1
ggccaatcttataaaactgattaaccccatgttccggcctaaataaaatggaaaggattccatgatacatactcagctaacagtaccccacaatggaaacaattttcatatcctggcaaaggaacccccaggggcaaaaattgacccaaattttcatatgccccacacaaaaaacggacttttcctggatttatttgccttcctcccccaaattaagacaagaaatgaaccgattttgcatcaaacttgtgggggaccccccattggtgaattcattaaaaccaaccaaattgcgtgtgctgttggaccaaatcccaccctttaggc

SEQ ID NO: 40033 - DNA, 382 bp, Oryza sativa
  Clone ID: uC-osroM202024c02b1
acacctttttcgccttttccaccttttcttcttttctcttttttgtttaaggcataatgagcatcatttttagcataaattggtcccccgcatcttaagcgatgcctccattgtaaaaattacaaatgtattcatctgccaaattgttcaacatgttcccccaaaaaaaaagttttgccgagcattactgaattgaagttctaggggatacaaccaacaaaatccaacttttccaagggcggctgttcctttttagcaccaagttctgatgaataaattcaatcttggataattagcaaatctgggaaaaacaaaatgccaaaatttatcttgaaaggatgaatttttatgaagaataattgggaaatatttggctttttgg

SEQ ID NO: 40034 - DNA, 394 bp, Oryza sativa
  Clone ID: uC-osroM202024c03a1
gaaaggaaattaaactgatttattacttgttccattaaaaccatcacactcgggtacgtggtgaaaccgtgaaagttaaaaaacaaaaacagtagtagtagagtgaggccctgctcgctgttacatgagaggtgcacgaagaaccagcacacgagcagagcatccagcccacacgcagcaaggaaacggtagggatgccgccgccgccgccggccgatccgccgcccggcgatgatgcgtcgtcgtcgtcgttcaggtgcacgcggaggcggagcggcgtgcggcgcggcgcggtcgagaggtgatgagtagttgacgcggagcagatatatatggatggatggcgtcgtcgtcggtcggacgacggcgaggtcgcgcgcattacgcgcgggcg

SEQ ID NO: 40035 - DNA, 90 bp, Oryza sativa
  Clone ID: uC-osroM202024c04a1
tttttgttttttttttttttttttttttttttttttaaaactaaaatcagattggcatagcattcttcatttacccgccctatttgcaac

SEQ ID NO: 40036 - DNA, 291 bp, Oryza sativa
  Clone ID: uC-osroM202024c04b1
ttcgtctttggcgccgccgccagccgcgtaggtggtggcggcggcgggtcgacccgggtgagcttaccgtccggacgcgtccagcgcctaggagcgctggggatgctgacgcggtcgtcggtggccgatcgagaaggagacgcccgagagcgagccgacgacgacgttcctgcggtaggacggctacggggcggggtcccggtcgatgcgggagcggatagtggccgtgatccggcgtgatgcagggggaggtgtgcgcggagctggacgaggcctacgggagcgggcccc

SEQ ID NO: 40037 - DNA, 125 bp, Oryza sativa
  Clone ID: uC-osroM202024c05a1
acatagttttttaaagtcttttgggttttttttttttttttttttttttttttttatcataacgacaaaaaaaaaattgcacccaaaaaaaccagaacaggggaaaaaacaaaaaaaagggaaaa

SEQ ID NO: 40038 - DNA, 336 bp, Oryza sativa
  Clone ID: uC-osroM202024c06a1
ttttgtttttttaattttttggggttgtatcattttttttttttttttttttttttttttttttttttttttttttttttttttttttttttttttttttttttttttaaaaaaaaaagaaaaaaaaaaaatcacaaaccaaaagttcaaagtacctttttttcaaccccaaatattttttaaaaaaaaaaaaaatttttttaaaaaatcccattcgggaaaaaaaaaatttgttaaccccaaaaaaaaacaatgatttttgaaaaaaaaaaacaattttgggaaaaaaaaagcccctttaaaaaaaaaataaggtgtagtgaaacacacaaaacc

SEQ ID NO: 40039 - DNA, 256 bp, Oryza sativa
  Clone ID: uC-osroM202024c07a1
aataaaaaaaagaaaaaaaaacaaaaaaaaaaaaaaaaaaatataaaaaaaaaaaaaaaaaaaaaaaaaaaaaaacaaaagggaaaaaaaacaagcccccaaaacaaaaaaaaaaaccaaaaaaaacaaaggaaggataaaaaaggaacaaaaaaaaaaaaaaaaaacagcaacaaaaccccccaaaaaaatgcatagcaaaaaaaaaaaaaaaggtaaaagaacacctaataacaaacaaaaatacctaagaaaa

SEQ ID NO: 40040 - DNA, 308 bp, Oryza sativa
  Clone ID: uC-osroM202024c07b1
gattaaaaaaagtgcctataggtgagtatggttggacagaacgcccatgtgtgaattgccattctaacacttgtttactatgcagtaccttgctggggatagatgaaaccgactggtacataccagctctcaaactgatcagtggttggtgatgtaagggagtctgacgtaatgacctatatgcatattgggtaacgagtgattgatcggctagcaatgtatatgatctttgaaaccggctctttcaaagagactggagagtctatccatgtaatcttaccaaccatgaatgtataaggtggaaactg

SEQ ID NO: 40041 - DNA, 361 bp, Oryza sativa
  Clone ID: uC-osroM202024c08a1
cccaaaaaaaaaaaaagaactttttaaaaaaaaaaaaaagaaaaaaccccaaaaattttttggggggaaaaaaaaaaaaaacccccgtttaaaaacaaaaaaaggggggggcctttaaaccccttaaaaaaaaatcccgggtaaaaaaaaaaagggaacaacaaaaaattggggggggttttaaaaaaaggggaatcaccttaaaaaaaaaaacgggcatcaattttttagagaaaaaaaaagcccccggtttgggcccaaaaagggaaattttccggaggaaaaacctaaaaatgttcccccattgttcacccccacccatgggggcccctcttttttgccccccccaaaaatttttttc

SEQ ID NO: 40042 - DNA, 310 bp, Oryza sativa
  Clone ID: uC-osroM202024c10a1
aaaaattacattctgaaaataaatccgccatgagattactgcgccaagataatgaagcccaacaaattggtcacaaactatgaaacagtacaagaaaggtcaaagcatctccaccagtaaaattttccacaaaggaaaaaacttcaaactattgatctaccaaaactaggctgaccaaattagggaacccttcacaataaccggtgaggcgttcgcaccatggacgggggctttagacagctgacatttggctggaccttggggtacacaaggggggagctgcaatttccacagtgggaatgcctggagc

SEQ ID NO: 40043 - DNA, 137 bp, Oryza sativa
  Clone ID: uC-osroM202024c10b1
ttttggttgtctttttttttataccttttatcgttgaattggttcgttctcgaattctttggaattagaatcagctaagaacattggtttctctgttcttttaaatttgggggggggaagaaaacctatacaaagag

SEQ ID NO: 40044 - DNA, 455 bp, Oryza sativa
  unsure (1)..(455): unsure at all n locations
  Clone ID: uC-osroM202024c11a1
acaggaaacattgtctacaacaagctcaaggaaaggtctgaccagtttgttgtgagaggtttagtgagaacagaggaaagcaaacaaaagattggtggaggcaatgatgtttacattgccgacataagggacagagatcatcttgtgcctgctgttcaaggtgtcgatgcgctcataatcctcacgagtgctgtgccaaagatgaaacctggttttgaccctagcaaaggtgggaggcctgagttttactatgaagatggaatgtatcctgagcaggtggattggattggccaaaagaatcagattgacactgccaaagctgctggagtgaagcatatcgtgcttgtgggatccatgggaggaacaaatnctaaccatccactgaacagcctaggcaatggcaatatactggtttggaagcgcaagtcagaacagtatttggcagacagtggagt

SEQ ID NO: 40045 - DNA, 476 bp, Oryza sativa
  Clone ID: uC-osroM202024c11b1
ttttccgttagacaataataattaagccactactactatacagagacatcgatgaggaagcagttagtggtggtgttggctttgctggtggcagcagcagcagccatggcgatggctgatgaggaggacgtgacattgacggacaaggacctggagacggaggagagcatgtggagcctgtacgagagatggcgcgccgtgtacgcgccgtcgcgggacctctccgacatggagagcaggttcgaggtgttcaaggcgaacgccaggtatatccacgagtttcaaccagaagtcgaagggcatgtcctacgtgctcggcctcaacaagttctccgacctcacctacgaggagttcgccgccaaatacaccggcgtcaaggtggacgcctccgccttcgttactgttaccactttcttttccgacgaggagctccccgtcggcgtgcccccggcgacgtgggattggagactgaatg

SEQ ID NO: 40046 - DNA, 354 bp, Oryza sativa
  Clone ID: uC-osroM202024c12a1
ttggtttttttttttttttggtttggagcaagtagcaaacccactttcctttccagtcgatgcatcaatacatcaaaaatgaaaaggtgaaaatttgttaattgaaatctgaagggcaagaagcccatatgtttttgctatgacagatcaatctgcaacagatcggtgatcgaatcagatgtcgaacaagacctcatcgtgtataaggcaatcttgtggtgaaaagcttcgagcgaacaatgcttcaggctttggccaagataaagttactcccacggcctttgaagcttccgtgaagaaatgctacaaaaacagatctaaatgcgctgtttacttgaattttggcaaggtaat

SEQ ID NO: 40047 - DNA, 456 bp, Oryza sativa
  Clone ID: uC-osroM202024c12b1
ttcaagcttaattaagctcgtaatctcatataacctctttttggacgaagcttgccactcgatcgtgttaaccactcgagcttgagcgagcgagctagctttgctctgacgagaaaaatggcgtcctttcacatcgccacggcgctctcggcgactctgctgctctccttgctcgtcctgggccgctccgacgccaccctgccgccgccggccacgccggtgccgccgtccacggcgtgcaatgggacgacggaccccacgttctgccggtccgtgctcccgtcgaacggcaccagcaacctctacacctacggccggttctccgtcgccaagtcgctggcgaacgccaacaagttcctttcccttgtcaaccgctacctctccggcggtcggctcgccgccggcgcggtggcggcgctgcaggactgccagctgctgtccgggctcaacatcgac

SEQ ID NO: 40048 - DNA, 438 bp, Oryza sativa
  unsure (1)..(438): unsure at all n locations
  Clone ID: uC-osroM202024d01a1
aataaatcgcacataatagtaactatgatcttcaaattcacaaattctccatatgaatattacatacatgcagaatgtgaaggaaaattaaccaaacttggaagcaccagcgggaagcaacatatggcggacatagttcaaaggaatggagaccatatgcatggatacatagtacataatagtgcagtagaatctatccacgaggcgaaatgcaggatgcgaaggctgaattcgttgatctagtgctggaccgaggcggccatcttgtacgcgtatctacactttagcgccacctcgcgcgcgccgccgccgncgatctcaggcgttgctccggtaggacccgagcttggcggcgctggccctcagcacgtactggtggtaggcggcggcgatggcggcgccgatcagggggcccacccagaagatccattggtcatc

SEQ ID NO: 40049 - DNA, 339 bp, Oryza sativa
  Clone ID: uC-osroM202024d01b1
ttcgcgtgtggccgccctttttttttttttttgtcataacctgaaacgatatggttattcataactctcccagggcataaactcccaaaccaaaccaatgatgaacactacctcaacaagtaccaacacggccaaccaacctatcatcctccggtatacggtaacacaacaagtacactaggaacaggaaaacttttggtatggtgctaaagacagcaggggtggagatgtacattgagaagattcatcaagtttaaccgcctaagcgaagggtggaagcagccatccacgttcagttgcgagaaccacatatgcttcaaacttttcctgtgcatttgg

SEQ ID NO: 40050 - DNA, 374 bp, Oryza sativa
  Clone ID: uC-osroM202024d02a1
ggggaaacgaaaaaaaacattattggaaaaacaacatcttcttcttcatcttcttaggggaccccacccccacccgatcataattttggggcactaaacccattttccccaacccaaaaaccacgaacccgctggccccaaatccctccaaccccaattaacccctggtaagctacgggcccccactttacttgccggggaccaaattgggggggtccccccaagcctttttgttgaccgggcccgcgagggggcccgccagggtcccgagggggcccctgccggggaccatggcccggaccaaaaaacccaacctggagaacatggggagggggccggtcctgaaccccctcaccctgagccccccgaacccc

SEQ ID NO: 40051 - DNA, 354 bp, Oryza sativa
  Clone ID: uC-osroM202024d03a1
attcgaatatatatatatataaaaaagcagacagggtacacccattaaaacccaaaatcaccggaattgaacatcaaaaggccaacccaagccgcagcagcatcagccagcagcaaacgacatgattccccacccttttgggtgaaaaacaagaagccccaaaagaaaaaaaccatgggcgaacaccttgatcgagcccaacaatggggatcgatcaccaatcacctacttggggaacccgatggcccaggcgttggcgtaaatgtagggggccctgaagccggggaatccgggggggcgggcgagctccctgaaccccctttagaacctctccttgcccccggggttgggggc

SEQ ID NO: 40052 - DNA, 195 bp, Oryza sativa
  Clone ID: uC-osroM202024d03b1
acgtttaccctttttccccgtccgctccgtcttgggtgacggagaactcgaggtcgcccactgagatgtgcgctatacgagcagaggtgtggcgggcgacgagatgcggctcacggacaccaagctgctcacccggatgtgagccaaaaaggtgatgcggatcagtgatggtggctcttgacgcagcccggaaga

SEQ ID NO: 40053 - DNA, 463 bp, Oryza sativa
  Clone ID: uC-osroM202024d04a1
tttgtttttttttttttttttttttttttttttttttttttttttttttttttttttttttttttttttttttttttttttttttttttttttttttttttttttttttttttttttttttttttttttattatttttattataaaaaaaaaaaaaaaaaaaaaaaaaaaaaaaaaacttttaaaaaaaaaaaaaaaaaaaacaaaaaaaaaaaaaggggggttcccggttttttttaaaaaaaaacaaaaaaaaaaatagcgttttaagggggaaaaacacacccctttggggggaaaaaaaaaaaaaaaaaaagtgaaaaaaaaaaaaccccaaaaattttttaaaaaaaaaaaaaaatggacccaaaaaatggtggaaaaaaaaaaaaggtggaaaaaaaaaattttttttaaccaaaaaaaaaaaaaaaaatgggaaaaaaaaaaaattttttaggcgg

SEQ ID NO: 40054 - DNA, 331 bp, Oryza sativa
  Clone ID: uC-osroM202024d05a1
gggatgaaagcagagggagattatattaagaagcctggcccgcatgaggagatggagcaggagtccctgatgagaccaccatgatgatagatgatccatccaagctagctagggatccatccaacattgatcgacacacgcacacactgacaacgacgacgacgggtttatttaggcggcagagcaaaaggcaaggcctgcctacatataagctgggtactaatgcaagcaaattaaggcctcgatcaaagctctgatcgacagtagcagcatccatacgataaatcctcatgcagccgggcgacgacgacgattgattcagttgcaggag

SEQ ID NO: 40055 - DNA, 348 bp, Oryza sativa
  Clone ID: uC-osroM202024d06a1
ttttggttttttttttttttttgtttttttttttttttttttttttttttttggcaacgcaaaaaaaaccccaagcctcaattcccacagaaggggcaaattgaaatttccacatttatcacctaggagctttccacattggaaacccaaaaaaaaaaaaggaaacccattttgctttatggaattgaatcggggcaaaaaatttaaacgattttttcaattccaggtaacctaaggccctctaaaggatgactcccccggcccatttccaaaaaactgaaccgatgccattgacattgcctgacaaacatgacccttgagcccgccccaaaaatttggcttttataa

SEQ ID NO: 40056 - DNA, 348 bp, Oryza sativa
  Clone ID: uC-osroM202024d07a1
ggagtcctcaagcatcgagataatttttattagattcgcttttccagatagcctatcaacacgaagaatctgtacccagctgaaagatattacatttcagtggattccattccaatgacgggaaaggacacgctggtcaccttgattgcgaataggaaacagatcatcctcctgcctgtaaccatggccacggctattgcccaaattatgaggtcgcccatgggtgtcaaatggatgaacatagtctcggtcaggtccacctcttccaatggaggctttgttcaagggcctgtcccgaaagggtgaacggcttctctcccgtaagtctagtcccctgttcatgggctt

SEQ ID NO: 40057 - DNA, 397 bp, Oryza sativa
  Clone ID: uC-osroM202024d07b1
caggagaaaaaaataatagcagcaaaacatacacatggacatgagctggagtatatatttgagcactagtacaaaaacaaacaaacaaatagcatgagctctccgtagtggcggtcgttgtagttgcggatcacaatcatatcatttcgatattccaatccacctactaccaagaagccttttcttgttcggatcagtttatcggctcatcgcagggaggaaacaaatatcttgtccttgattcctcttccttatcagtgatacgatacacaccgtacatgccgcaattaacactaaactaatcaggcagcttgatctgcatctccatcaattattggcagagtagtaacagtagcaattggaacttggaagtgatgtacagcgcgggttgagctag

SEQ ID NO: 40058 - DNA, 373 bp, Oryza sativa
  Clone ID: uC-osroM202024d08a1
gggtatatagccggagctttgttttcacatatcctcacccaacgataattgtagtactcttacaataaaaccggtcggagagggagggaagagattattacatatgtgttaagagcagaggccattgagatggtacataaccaaattgtaaaataaaaatatatagcatattatatattgatatatcatcaacatagcccaaaacaaagctgcatactattattataggcagcaatccaccagcgcgatgcttgatcttagcttagttgccaccagactcctcgcaacctgggggcttgtaggcgatgaagctaatcaactgcacctgcctgacgttgtcgaagccgatgatacggacaaaggcatcggggta

SEQ ID NO: 40059 - DNA, 416 bp, Oryza sativa
  unsure (1)..(416): unsure at all n locations
  Clone ID: uC-osroM202024d08b1
tcggaacagaaagcttcccccagaaaatcccatctcacggcgatggcccccgccgccgccgcgaagctctccgtctccggcgccgccctcgcggcgctgctcgcctgctgcggctcggccgacggcgactccgacgggctcctcttcggcgtggctagccgcgcagccgcggctcccccgtccttctacgacgacgacgacgacgaccaggcccgcgcctcctcgggcccctccctctccatctccgtcgtggggcacgcctcggtcgcgcagccttcctccctcgccgatccgctcggccgcttcaccaggtcgtcctactcccccgacccctccgncgccaatcggttttttttcctcctcccgccgccgttcgccgttgcgcccctccatgcgcgaggccgccctcgcgcgct

SEQ ID NO: 40060 - DNA, 374 bp, Oryza sativa
  Clone ID: uC-osroM202024d09a1
aaaaaaaagaactacgttgtaattgcatttggatagaacaaaatgttggaaggtccatatggtatggaatttggggggcatcagttaggtccaaacatgggctttgaagacccagaagaactactggccaccaacaatcctggtttccaacacccccaaaaaaatactgagtagatgaaggatgatcagtttccttatcttttctacgcttgtaaacgttgaaacttggctgacattgcatttttcacacttatattcgggaaatgaactttacttgacggagaaatcagaaattcctctggatcaggcctacaaaacagggaactacttcaggccttcagggctttatgcaatttccttaacttttgatcttg

SEQ ID NO: 40061 - DNA, 243 bp, Oryza sativa
  Clone ID: uC-osroM202024d10a1
ctgggaccctcatcaggcatctgattaaatttgaataaaccgaacatatgtgtccaaaatcacaagggagaaccccaggttgcaataggtattacagtctttgaatagaagaaaatgataacagattggccggttgaaaactttggccacgcttatgaagaaacagccccaaaaagggagaaacctgccggaggacggggataacaggtcctcttggcttagcattcttggggcccaagaatt

SEQ ID NO: 40062 - DNA, 400 bp, Oryza sativa
  Clone ID: uC-osroM202024d10b1
gataagagggtaaaaccattgcattccaaatttatgagaaaactgaatgggtgcacctagaccatataaaagcacaagctacatgaatgttccttccatgcataccgcacatgacacttcattattcaaagtacagaattcagacctagaatcataaagacaacagtagtgaattcaaagagaacccacaaagagacaccacacagagttactgataccattcaagtcctcaaatggccgcaccattactctttctcgccagcttagtccactctgtgtggaacgaacctggacggtcaatgcgctcataggtgtgtgccccaaacaagtctctttgtgcttggatcagatttgcaggcagtcgactacacctgtaggtgtcaaagtatgaaaggctagc

SEQ ID NO: 40063 - DNA, 375 bp, Oryza sativa
  Clone ID: uC-osroM202024d11a1
ttggttttttttttttttttgttttttttttttttttttttttttttttttttttttttttttttttttttttttttttttttggggggggaaatcagggaaaaaattttttgaaaaaaaaagggggcccttaccccccttaaaaaaccccccccttaataaaaacaccccaaaaaaatcatttttttcccccgggaggcaaaattaaagggggggaaaaaaagggggggcaaaaaaaaaaaaaacccaaagggggaatttccaaaaaaaggaagccttagggggtataaaacccccaaaaaaaagggccccccccccttaaaaaaaaggaagggggggagggctggggtttggggggggccccccccccggggg

SEQ ID NO: 40064 - DNA, 250 bp, Oryza sativa
  Clone ID: uC-osroM202024d11b1
ttccgcggccaaaccagtctaccgcaaaacggcttagcgcgctgtcgaatactcagaacgcatagtggcctactgcggcgatgtcaaggacaagctcatgaagagcgctgtctacgtcggggctcctggcaagggtatactagctgcaactgagaccaatggcaccatcggcaagcgctatgccaggatcaatgcttggaacgatgaggagaaccgctgctctcttgacgagatgctatttaccacccct

SEQ ID NO: 40065 - DNA, 303 bp, Oryza sativa
  Clone ID: uC-osroM202024d12a1
ttgtttttttttttttttgtgtttttttttttttttttttttttttttttttttttttttccaaggggcaaaccccgattttttcccatttcggttaagggggcccaaaacctaaaaaaaaagggctgggggcaaacccctgaacatgggcatacaaaagcccggccaaaaaaaaaaaaaaacccccaatgggttatttaggaagaccttttcccccccaaaaaccaccccccccaatggcccattttatgctcccaaattttcttttttctccccgtttggttcccctgtttttgccaaaaa

SEQ ID NO: 40066 - DNA, 328 bp, Oryza sativa
  Clone ID: uC-osroM202024e01a1
caccgccagaaaaagaattacatgatttaaataaggcgattgttacaacttacaaagtcacaagacaacaaacattggaacgaattacaatacgcgcgtgctacagattaaccttaaaagcaggctcactactcactaggcactaacttcacttgagataaaactgaaagaatgtttggtagttgtattctacagaacatacagaagcttaggagccaagtgagagagcaccagccgcaaataaaagatttcgccgagaaaaccgcagagtataaacaggagttgtttttgtacggagagttttgagcatccttagccggttagttga

SEQ ID NO: 40067 - DNA, 419 bp, Oryza sativa
  Clone ID: uC-osroM202024e02a1
aaaacgaaaattcgcgatgacacgcatccaattccagactccaatacaaatcttgatcgaactcctcttttgcaggtgaaatattttactctggtgactaataccaacaatttttccacacactaaaccagtaaatcaatggaaagaatcaattcataagctttgtgaaagaaacatttgattccatcatggctaccaagttagaaacaaacagtacaagtgtttagccctgggatcatcaagggatcacgaggtgtactcaaatggctggggtggcaggggctcctcgtcgacggccatggcggcggcgcctgagccttgctggccagcggtggcggctgcggcgttcgtcgcctgagttgccggggcgtcggtgaggactagttcctccgtctcggtgggcttgaggtcccgtagga

SEQ ID NO: 40068 - DNA, 335 bp, Oryza sativa
  Clone ID: uC-osroM202024e03a1
ggatacatacaacaactagctgcccaccgaggtatgagcaaataaggggagcctcgtggttaaaaattacaaggtacagtcagtatcatacagccttctacacgtgtgtttacacaagaaagcaagtgaaggactacaagaacacaatgaaaccctatgagattctcaacatcaaaactcaccagctgctgttcctgtaaaaaaagggggaagccgataagatgcacacacaacaaattcaatacccatcctgccatccacacactcaacacggtcaggctcaagctcaagctaaagcagcagcagagtcaccggcagccttgtccggctggtta

SEQ ID NO: 40069 - DNA, 350 bp, Oryza sativa
  Clone ID: uC-osroM202024e03b1
ccattccaagtaaacattctcacacaaagattacctattacactcaggggctgcctctcgctaaagaaattcaagaactattcttttaacaacatatgtatgcttctactttctatcctgaaaatgatttctcattgatcaacttgaaaaatatgtttcctagtgagtcatgtgtcaactatatgagcacctccacatcatcctcggcgctttcttccaaaaggagatcatctctttgctcaggcttcttccttctctcattcttcttcctggtcttctcacctatagcattggcgatggcgatgggtagccaaaatccaggccttttgaggaactgagctcggtgaaga

SEQ ID NO: 40070 - DNA, 363 bp, Oryza sativa
  Clone ID: uC-osroM202024e04a1
ttttggttttttttttttttttgttttttttttttttttggtttttttttttttttttttttttttttgggagctgattccacattccaggaaataatatataaaaaattcaaacaaagccctagcaccaccaattgggggctttttggacagggaaaggggcaaaggctcccagttcttcactatcccaaaactggaacccgctagggtgaggcttgggcatccatgccataccaaacgggtcggcgttttcaaaccccccggggttggggaaagggggacagccaggaacatacacgatgacgaggatgaccagccccaccattttgaggatgggaaccttacaccagttttttttgatgc

SEQ ID NO: 40071 - DNA, 440 bp, Oryza sativa
  Clone ID: uC-osroM202024e05a1
ttttggttttttttttttttttttttttttttttttttttttttttttttttttttaaccaaagggaacccaattcatgggaacatcacgggcaaaaaacccccaaccctggggggagggatagggggcttctcgacccgagagagcccctggacacaaaaaccacccgacccgaggaaaaaaagattctgacccggataggtaaggataaccggccccgaggggcccccccaaaaagttcctccagttcccgccggaatccccgccgtagccccccccacgggtgccaccgtagccgccgccgccggcgccacgggcgccgtctaaccggcgccgccccccgaacccccctcacggggcccgtagccggcgccgccacctttttcggaggcggcggcttccaaaacgggggcggaaccgccccccccccccgggatgcc

SEQ ID NO: 40072 - DNA, 416 bp, Oryza sativa
  Clone ID: uC-osroM202024e05b1
ggaaaaaactaaccactgcattgcataacaatttcgttctcccgagcaatttacatgttgggttcagagaaaacaatactatgaggatgcctgaactaccacccattggttgtcaaaactgtgcctgcaaatcgggcacatgaccttcccagcatcgccggtgcacctcctccatcctttccaccggattgcagatgccggtgcagttccagtcgaatgacgctgcgcacgggttcccagcctgcgccttccattcgcagtctgggggagtgccacagcaaaggcttttttcatgcacatgcttaacatcccaatccaatcaaccaagaaccaaatgacacgtctttggttgaatatttgggccagatatgccgatttgctgatatgaaggttgctaaatctcttgttacagcata

SEQ ID NO: 40073 - DNA, 443 bp, Oryza sativa
  Clone ID: uC-osroM202024e06a1
tttgtttttttttttttttttttttttttttttggcctgacatcgcgtttcccattggtggatcgggaaatttcttatgcacgggacaaatttatacaggggcattgcccatgttcccaggaaaacacgacaaaagacctaaaattccagggcgtcgttgaacccggcgtcgtaggcggggtcagcctccatgtcgccgaccatttccccgagcattatcccgccgaccgggccgccgaggagcccgagtccgaggcccatgcccattcgtccacctttcctcgccgccggttgttgtgccgccgcgtagctgtacgtcgccggcggcggtgggccggcgttgtacgcgtacgggggctgacccgcgtaaccgtactgctgctgatgcggagggtaccctcctccgtacggtgcgccgtaccggacgaccggggggtgcgcta

SEQ ID NO: 40074 - DNA, 405 bp, Oryza sativa
  Clone ID: uC-osroM202024e08a1
aagaggagcaaactagcataacagtaacttcattgcaaaaactgcaaaagtagcagattacaccatatagtcacgagcgcgtccagcgtgctcaatttcaagcagacactagaattcagaacttgcgaatatagttgcaaaaagcagacaatagacaaccagtacgaccttggcaacagcatgccttttaagttcgataacttcttgacacattactatcatgatgatgtgactcagtaatcctttcgccttaatccctttcagcataggatgaggctggcccacgcccatcaatttctggatagctgatttcgaaggggtcctgcgtaagtagagcgaatcaaactcgttgcagctgcggcgtcccttcctgggccagcacaggcatgtgattggctgattggt

SEQ ID NO: 40075 - DNA, 210 bp, Oryza sativa
  Clone ID: uC-osroM202024e08b1
tgccgaccgcggtggaacgatcggggcgaggtgacgcaagaggccgccagtgccgcgcgccgtgagtattgacctcgagtgccggagcccgacgggccgagcagctccgggtcttgctcggactcgcgactgcagcaatatattactttcaatgacatgatagttaattacgcatgcagatatctctaatacatgagagcatggttctct

SEQ ID NO: 40076 - DNA, 350 bp, Oryza sativa
  Clone ID: uC-osroM202024e09a1
aatggcactgaatcatttgtatttcctcatcctttatattcatccctcccagagagacggttccatggaagatttcttgcccttatcaggcaagcacagcacacccccccgggggcaggggaattggtttgaacaagacgctaaccaacatccagagctaaaacaaacctgggggtcaaaggaactcccgaaaaaaaaaacccaggggaaaggccccatttttttgtggtccccaacgcctccgtgtcaccaccacgttttgcggattttttttcaccctgttttattcgctcaggcgtccactatcccgccgacggcctttgaccccaggatcagccccgggtgcgcct

SEQ ID NO: 40077 - DNA, 526 bp, Oryza sativa
  Clone ID: uC-osroM202024e10a1
tttgttttttttttttttttttttttttttttttttttttttttttttttattttattaataatattaaaaaaaaaaaaaaaaaaaaaaaaaaaaaaaaaaaaaaaaaaaaaaaaaaaaataaaaaataaaaaaagaaaattataataaataaaaaaaaaaaaaaaaatacaacaaacaaaaaaataaaaaaaaaaaaaaagctaaacaaaagcaaagaaaaaaaagaaaaaaaaaaataaaaaaaaaacaaagaaaaaaaaataacaaaaacaaaaaataaaaaacaaaaaaaatataataaaaaagaaaaaacaacaaccaaaatataattctaaaaaataaaaccaaaaaaaaacaaaaattgaaataaaaaaaaataacaaaaaaccaaccaaaaaaaaaaaataatcaaaaacaacaaaaaaaaaagaaaaaaaacaaaaaaaaaaaccatcaaccacaaaaaaaaaaaaaaaaaaacccaaaaaaagaaaaagaaaaaacaaaaaattaaacatcatatc

SEQ ID NO: 40078 - DNA, 459 bp, Oryza sativa
  Clone ID: uC-osroM202024e11a1
ttgttttttttttttttttactacgcaaaaaagttgtcattccattcgacgtttagttattccgccatgaacaccacaagcgttttacaacagcaagcaacggacggagccaactcaatgacagacaaaccgcacaagacacgtcgtccacacggacgccgaccatgacaacacctaaaccgaacaatgggggagggaaaaaaacgatggaaataacacgacagggaccaaggctgcgacaccggagctcagcagctgacacatacatagactacaaatccacaggcatgacacacgcctgatccgcctactttgcacttgatggcaactctagcaatggcactgcaatagccttcctctgtgcccaagtgccctctcctatctaaagagactaaccctagatagatgcatggatagatagacgattgttcatgggttggatggatggatggatacttg

SEQ ID NO: 40079 - DNA, 436 bp, Oryza sativa
  Clone ID: uC-osroM202024e12a1
tttgtttttttttttttagacaaaatctctttcgtttaattcaatatatccagataaaatacaagtgacaaaattcagttgtattgagtctacacaaaatacagcttagcaacagcaagattgggaagcaccatgtgcaccaaaaaacctatgatatggtaaattggcaatacaaagccgtaagtgtaatctcctccgcggtatttaccttccgtatactgattgcagttgctctgatgttccagccttctcagatggcatgctctggctgctggaaaattgattagcagctgccagacttctcacatggttttcgtatttgcaatatctgatgatctttatgcagcaaacttttgtgggatgaacctgaaaattggtgtctcgtctctgaactctcatcagcacgaattcactggtcaagtgatcatgactaaat

SEQ ID NO: 40080 - DNA, 280 bp, Oryza sativa
  unsure (1)..(280): unsure at all n locations
  Clone ID: uC-osroM202024e12b1
aannaaannanaaagaccgaccaatctcatagcaaagcaaacagtacaatgtttttttttcagaacacgagtagaacaatgtttacaagcctatttggagcacaaaaaatctcgtaaaattgtgcagaaaccttcaccttccccatgaaacaattcatttttcacacaagttataaagtaggatatccacatactttctccgttgcacagaaaacaaatctagtatcgggtggaacaaattctagtactaccaatctgatagtagaattggagaattagg

SEQ ID NO: 40081 - DNA, 353 bp, Oryza sativa
  Clone ID: uC-osroM202024f01a1
tttttttttttttttttttttttttttttttttttttttttttttttttttttttttttttttttttttttttttttttttttttttttttttttttttttttttaaaagaaaaaaaaaaaaaaggaaaacccaaaaaaaaaaaaaattggggggtaaaaaaaaaaaaaaaaggggcccccaaagggaaaaaaaaattaaaggggaaaaccggtggggggaaaaaaacttttcccctaaaaaaaaaaaaaaccttttaaaaaaaaaaatatttggaaaaaagaacaaaaggggggtcagccccccaaaaaattttttattgggaaaaaaaaaaaataataaaaacccggtgtt

SEQ ID NO: 40082 - DNA, 329 bp, Oryza sativa
  Clone ID: uC-osroM202024f01b1
ttcgccgcgccggttagacacctcatgcctccggcgcatccgcctccgtgcggggtcgcgcccgccgcggcggcgacctgccccctcttcctcctcccccgccggagcctgagccggagcctccacctccgcctccgccgcctctccctccccgccccgcgcgccgtcttccacgcccacgacgccgtcctccttcgccgcgccgccgacgcggacgaccgctccgcggggctcacctccccgcaccccaactttgggtgcgtcatcggcagggcccaactcgagaccgacaacgcccaagcatgggtggtgggcgaagggttccttta

SEQ ID NO: 40083 - DNA, 349 bp, Oryza sativa
  Clone ID: uC-osroM202024f02a1
cccaaagggaaaatcaaacaaaaaattatctttttacgggggaggggtacatcagcaaccctggctccgaacgaaaaattacccatccatacttttaggggcaatcacaaggaaaaatttttggttaggtagcacagccaaataaacgccggggggatccccacttgccggggaaaagtctcggggaaagcttgcagcgggttcaatcaaaggaacctctaaagaaggaaccgggaaacaaccccaccagaaggctatgggctttgcaggaagagaattccatttacgatctaaacactcaccagtggggcctggcgatatccgggctggaaccgaaatggggggcccc

SEQ ID NO: 40084 - DNA, 428 bp, Oryza sativa
  Clone ID: uC-osroM202024f02b1
ctcttccacccccgaatccactccttaaccaaaccaaatctcgcggcgcatggcggcggcggcggtggcggcgaacggcggcggcgacggcgcgcaggcgttcaacgcgcccgcccccaccaggctcgcgtcggtctacagcgaggtgcagaccagccgcctcaagcacgcgctccccctcccctccgtcctccgctcccccttcgccctcgccgacggccccgccagcttcgtcgccggcaaccccggtgagatcgcgaagctgttccccaacctgtttggccagccgtccgtgtcgctggtgccgtcgccggagcccgcgtccaccaggccgctcaaggtcggcgttgggctcttccgcggtcaggcgccccgcggccacaatgtcatctgcggcatttttgattacctggaggaatatgcaaaag

SEQ ID NO: 40085 - DNA, 309 bp, Oryza sativa
  Clone ID: uC-osroM202024f03a1
ggcaataataagtcttaacatccaaatttaaaccgaacagaaaatagagttttaaacgactgacatagtgcacaaagcgagcagattttaacggtcaatgcaacaactgaaatgaccgtcgacaaaacttaacgagtactaaaagagctagatatctcaaatgcagatatggaaagcaccacttgaacgaggctcattttttcttggcggcagccttggtcaccttggcaccggttgggtccttcttctccacgttcttgatgacgccaacagccaccgtttgcctcatgtcccgcacgggaaaacgac

SEQ ID NO: 40086 - DNA, 392 bp, Oryza sativa
  Clone ID: uC-osroM202024f03b1
tccttctcccctcatacgccgcggccatggccaccggcaccgccaccggcgcgctcgcgctcctctctcctccgctccccgcctccccgacccctcctcctcctcctccactccgcgccattctcctcaagcagcctttcctccgcccgatacgccagcggcggcgtctgtctccgcgtcctctcctgcgccggcgcgaccccgtcgacgactgcgcacccaccgccgatgcagagaccgcctacacctggcgttcctacgacgcgctggaggccgagcgcgcctacctagacattgttcgtgagcacagggcctcccccgatgatgcgggttccatcgccgcgcgcgcgcccgggtacgccctcatgcttgtcgacggcgttcgcgagctc

SEQ ID NO: 40087 - DNA, 198 bp, Oryza sativa
  Clone ID: uC-osroM202024f04a1
tttgtttttttttttttttttgttttttttttttttttttttttttttttttattttaaatttttttaaaaaaaaataaaaaaaaaaataaaaaaaataaaaaaaaaaatttatattaatttttgggggggaaaaaaaaaaaaaataaaaaaaaaaaaaaaaaaaaaaaaaaaaaaaaggctttaatggaggggggag

SEQ ID NO: 40088 - DNA, 357 bp, Oryza sativa
  Clone ID: uC-osroM202024f05a1
ttttggttttttttatttttttggtttttcttttacttttttttttttttttcattatttttttttttttttttttttcttcccccagggcccccgggaaaaacgggaggaaaaaaaaaagggcaaaaaacaacaaccagggggggggggtttttttcaccagggaaaacaccgaaaaccgggggggggaccccctaacaaaacgggaaaaggggggtaccccccccccgggggcctaagccaacatcgggggggaaaggggcgcctcatggggaaaaaaaaacctggacggaaacccgggggcccacccggaaaacccggaccggccccgggaggggcaccactttcccctaaaag

SEQ ID NO: 40089 - DNA, 380 bp, Oryza sativa
  Clone ID: uC-osroM202024f06a1
ttttggtttttttttttttttgtttttttaataagaagcagctcttggtagatgaaattaggacttaccgttacaacatagcaactcactatcgagtaaactcgtaatagctgaaattagtccccggacacacgcaacaagggaagaagaaaagaagaaaaaacagcaacatactttgaaactgtagaaagcattgtccactcttttccgcgcgcaagacggcagctcaactagtctgctcatttcatggggcatgccaggtcaccagatcacctggcagtgtagaggggcttctcccacgagggcaggactcagaagatgtgttgccagatctggtgcgatggctgagatggagtggtctgagagctgctcaaggttcc

SEQ ID NO: 40090 - DNA, 469 bp, Oryza sativa
  Clone ID: uC-osroM202024f07b1
ttcaagggagtgcattgctgtggcaagtggccatgaagcagcagcagcgccagcaggctacggcctgttcatcagaacagcagattgttccatggctgaagcagctgcacaacaagaagccgcagcagcagcgaaagggtaccggtcttctccctcctcgccgtcgtcgatgtcccccactccgtcacctccaccggcggcagctgtccatggaggaggaggagcggaggatgccgccgccgccgtcattgcaacgccagccgcgcggagtttgggtgcaggggacagcggcagcatgcaggtgagtggccatggcgagcatgctgggttgagctccagacggcgtcgtggccggccgaaagggtccgggcggcgccagatccttgccaatctaggggaatggtatgcgttatcagttggagggagcttcacgccccatgtcatcatttgtcgccacaggtgaggatgt

SEQ ID NO: 40091 - DNA, 337 bp, Oryza sativa
  Clone ID: uC-osroM202024f08a1
caagcccaacaaggcccaacaacttggaccaaccggggaatatccaagaggggaactaattcacactgcaacaggaaaccgggaaaaaacctttaatttaacaaacaaacgcccccaagccaggggccctactaaaaataaattagccaaaagtaagaaggtcacaagccaaaatattgggggaaaaaaccccaaaaaccagggcctgaaaactttttaaatttggccactaaaccccacatgttggaaaagttcactttccaagaaggccccctttggcttaaaaccccaaaattccccttggaaaccgggcccccttaggcccctcccccaaaaa

SEQ ID NO: 40092 - DNA, 405 bp, Oryza sativa
  Clone ID: uC-osroM202024f09a1
cagttcacaagcttgcatctcagaatggcaagagacaatgtacacttctttttatcagcaatttgtgtcaaaaaacaatgaaatttgcccttacaggaaggcttccaggatttccagcatatcaagatcactgcttatggttttgctagaaaataacaacaaacctttgaaaataaaaagagaaaaaaataacaaatgagtgactgtggaagcggtatcgcaccaagatcctataccactaactaaaaaaatcaatatatcgacgattcagcagaattattgatcagcaagctatatttagtttgacccatatccgcgtggatgtgacttttgccatctccaagcgactgacaggctctccttgaggtcggtatattgagcagtccagttgagctccgtgttgat

SEQ ID NO: 40093 - DNA, 396 bp, Oryza sativa
  Clone ID: uC-osroM202024f10a1
tttgttttttttttttttttgtttttttttttttttttttttttttttttttttttttttttttttttttgggggaaaaggaaaaattaccaaaacccggccccaaaggaaacaggcccaaccgggggaaacacccaaggggggggcccacaaaacaaacgtaaagggaaaagcggggcttattacaggcccaaaaaaccccttacgctccaagggagggatccccccccctttattattccaaggtttgggcacaaaaccctcaggggttcatggaaaccggcccttggccccaacggtgacaaaaacccaaaacgggggggtggaaatttacagggtttttgggggtgggaagaccccctccggggggaagcccaaccccggggagaacttccc

SEQ ID NO: 40094 - DNA, 306 bp, Oryza sativa
  Clone ID: uC-osroM202024f10b1
acggaattgacaatcaagctttttgcctagttagggacaataatttacacaagcacacacatacacacacttgcaaattaatacccgttctgtatactactacttgagggtatctaaactctcactttttctctttccttcttggtttttcaccttgcttccttcggggagctggccggtaactgttttggcgatgggcaaatcgggtaagcggggggggaggagcaaacgcgggggggcgggcatgacacgaggggggcgttggtgagccccacgggctgcatgaaccagtggataaccgtgggg

SEQ ID NO: 40095 - DNA, 443 bp, Oryza sativa
  Clone ID: uC-osroM202024f11a1
cagttcacaagcttgcatctcagaatggcaagagacaatgtacacttctttttatcagcaatttgtgtcaaaaaacaatgaaatttgcccttacaggaaggcttccaggatttccagcatatcaagatcactgcttatggttttgctagaaaataacaacaaacctttgaaaataaaaagagaaaaaaataacaaatgagtgactgtggaagcggtatcgcaccaagatcctataccactaactaaaaaaatcaatatatcgacgattcagcagaattattgatcagcaagctatatttagtttgacccatatccgcgtggatgtgacttttgccatctccaagcgactgacaggctctccttgaggtcggtatattgagcagtccagttgagctccgcgttgatctttgttgggtcactgtatacttcagcatagtcccctg

SEQ ID NO: 40096 - DNA, 334 bp, Oryza sativa
  Clone ID: uC-osroM202024f11b1
gtcacacgctcacacatcgatcgtcattgtcttagctagctaatctttctttctcctcggttaattatcctttgcatgcccctctccaagctcggacgctgcaagctaagatgggtccgaggattcagcagctggccgctgtgttgctggcggctgtcgtcgtcgtcgcagccgccagggatgaacctgcaggaaaaaactaccaaactcaatgggatacagtgatgtcaatacttaactgcaagagtgattcgttgatccctagctacatctgcagcgtgatcagcaaaacttcgctggggttggagctcagatgaccccgacgactacacgc

SEQ ID NO: 40097 - DNA, 190 bp, Oryza sativa
  Clone ID: uC-osroM202024f12a1
ttgttttttttatttcttgggtttttcttttattttttttattcttttttcacttttttttatcatttattttttttttccaacaaaaaaccaaacccttttattatggccttcaaaaaaaaaagcccacttcttttactaaaaaaaaaaaagccaaaaaacttccgccaaaaattaaaaataccaaaat

SEQ ID NO: 40098 - DNA, 444 bp, Oryza sativa
  Clone ID: uC-osroM202024f12b1
ttcgcttcccccctccacccgtctcctccgtctccggcgccggcgccggcgagctcgccccccgcgattcgtgccctccgatcagaggcgaggcgggagaagagatggggctcacgttcaccaagctgttcagccggctcttcgccaagaaggagatgcggatcctgatggtgggtcttgacgcggccggaaagaccacaatcctctacaagctcaagctcggcgagatcgtcaccaccatccccaccatcggattcaatgttgaaaccgtggagtacaagaacatcagcttcaccgtctgggatgtggggggtcaggacaagatcaggcctctgtggaggcattatttccagaacacccagggtctcatctttgttgtggacagcaatgatagggaccgtgttgtcgaagccagggatgagctccacaggatgctgaaccgag

SEQ ID NO: 40099 - DNA, 364 bp, Oryza sativa
  Clone ID: uC-osroM202024g01a1
tttttgttttttttttttttttgggtttttttttttatacaaataagcaactttattccaacaagctgctacagaagatttcagagctggtattgcttgttaatggtatcaaactattacatatttcacacatctttaaaatactccgacactttgcttccttgacaatggaaacacagagccccacatcagtaatcaaagcatgaagaacaccgacaactaaaattaccatgaagaaacttggaggggaaccatgctatgaagcaaatcagggcaggatgttcacctccaagccattaccattttttaatagaagatcggttcagttccttcccaggggaagtgaccggcatgaggatggccc

SEQ ID NO: 40100 - DNA, 355 bp, Oryza sativa
  Clone ID: uC-osroM202024g01b1
tttgtgagttggtaattgatagtagcaagacaatgtgtgggggagcgatcatcgacgacttcgtcccgcccgccggcgcccgccgcgccgacgcctccgacatctgcgacaacgccgtcctctccgctgccggggccggtatttctatctatctactcctattcgacatgaacagatgtttcccatgttcatttctttgcagtcctcgcatgcgcaacgtgtccactgtttagatggatgcacacggatatggaacgtagctgcagagtcctatcctatatatgcgtggttaatcttctaattggctgctttcctgggcaccgtcttttttgtgcaagtgacgagtcgttcgcgg

SEQ ID NO: 40101 - DNA, 300 bp, Oryza sativa
  Clone ID: uC-osroM202024g02a1
tttttgtttttttttttttttgtgttttttttttttttttttttttttttatttttttttttcattttttataaaaggtattaaggagttttttttttttttgggggaggcccccaccccccccagggggggaacttggaagccccgaacaattccccaaacacacaccaaaaaaaaaataaaaaccctcgggcaaaaaaaaacccggggaagaatcaaggaaaacccccaaaaaagggcaaaaaaaccaagttttttttttaggaaaaaccccgggaaaagggaaaacgcacaacccac

SEQ ID NO: 40102 - DNA, 304 bp, Oryza sativa
  Clone ID: uC-osroM202024g03a1
attatcataggtttatgtatataatatgtcaatcttgttcggtcatacagacgattcgacgaattttgagcactaggtatttagcaaaactctcatttattccgcaggctctctccatatccaaggaaggaaggtggaaattggggggaaagggagataaaaaaggaagaaaaaaaatgcttcagggaagaactctatacatgtgcactcaaagcatcggtttgagaagctcttttttgaatatttatggcacttcagcagttcaactgctaggcttttggtccggacccagggagggccccac

SEQ ID NO: 40103 - DNA, 364 bp, Oryza sativa
  Clone ID: uC-osroM202024g04a1
tttggtttttcctaaaagtgggttattcacaaagactatgtttagttatggacactataagctataaatatacaggctcatacaaagagggcattgcatccatagatatgaagcttcaatacggagctgatgatataggtgcatcctctttgtttaagcaccctattacaagcatatcaaaatgtacaaggacgttacttttaccgggcaaacagggccattgctacttaggtgtttacatacgattacctgggacagaagattaatagggggctaataggacggaagtttgaaatacctaaggtccaacgaaataacaaacggatgcatgccgtggttgggagattaaggagaaatttcttac

SEQ ID NO: 40104 - DNA, 520 bp, Oryza sativa
  Clone ID: uC-osroM202024g05a1
tttgtttttacttaaaagtttgttatgcacaaagactatctttagttatggacaatataagctatagctttccaggcacatacaaagaggttcttgcatccaaagaaatgaagcttaaatacgtagttgatgatatagctgcatcctctttctttaagcaccctattacaagcatattaaattgtacaagcaccttacttttaccgggcaaattgtcccattgctactttgttgttttcatacgactacttgggacagattattattacttgcctaataggacggatgttagaaatgcatatgttccaataaaataacaaaaggatgcagtagcttgtttggggttcatggtgaaatttctcgagggtttgcaagcagatggagaccattgtcgatatggagagtgaacattgttttatagattggctccttggattcatcttccagtctgaacttgaagaaatgtatcagggtagcagccatgatcttcatctgcctgtgtgcaaattttttcccaagc

SEQ ID NO: 40105 - DNA, 470 bp, Oryza sativa
  Clone ID: uC-osroM202024g06a1
ttttgtttttttttttttttgggaatttgatccgcaacgattcagatgcagatgaaacactgctgattcccactcagattacacacaatacaaatacaccgacaaactgcctcaaaaaccaccaaattgattcaaaagtaaaacgggtatgagggatcttcccaccgagactgactaaacctaaccacagacaattggatccactggacccagattattcaaaaacagatggctatgacggcatcgtcctcgcaaccgaagggaacttgcagctatggatatcctcacttcgcgctggcgagctgggtgcggatgagcttggcggccgaaaccatgttggtaagggcgggcttgacctcgttgtacttgcgggtcttgagaccgcagtcagggttcacccaaagaatgttagtggcgagcaccgcgagcatcttgttgacgcggtccgcaatctcctttgtggacgggat

SEQ ID NO: 40106 - DNA, 393 bp, Oryza sativa
  Clone ID: uC-osroM202024g06b1
ggcgacgctcggcgacctgcgcgccgtcctctccgacgcggagagggcgcgcgaccgcgacgcggccgtggaccggtgggtgcgggagctcagggacgccatgtacgacgccgacgacatcctcgacgagtgccaggccgacgcggggggcgaggccgcgacgcccgttgccatggcgggctgctgctgctgcttccgcggcgtccgcgtccctgccctctcctgcttccgcgaccccgtccgggcacgcgagatcgggaagagggtcagggcgctcaaccggaggctggacggcatcgagaggaggagctcccgcttcggtttgtctcccagactaggaacatcttctcgtctccctccccttgctgctctcggcgcgcagattcaggcgac

SEQ ID NO: 40107 - DNA, 308 bp, Oryza sativa
  Clone ID: uC-osroM202024g07a1
aacatacgcaacatagatcttattaatccatcaagttccagtcacagcagtagataagaggcatagagcagctaagcccatagtaattacacgcagtttacctggcaaggtaaccgctttttaagaggcgcgcacgcgcacttaacacatatctccgcgacaaatataccagtcgcacaacaccacacacagttcataagcaagcaggccctgagactgtagcagcagccccggcggccggcgctagccttacacctcgtcacattatttacgcatatacacacatagttaggttatagatagggatg

SEQ ID NO: 40108 - DNA, 396 bp, Oryza sativa
  Clone ID: uC-osroM202024g07b1
tttgagccggagcgagttggctttgttgtgttgagccctttcctgggcctataaattcggcatcacgcccaacgcatcccctgcccagaagaatcccagctaccaaatcgaacctaccaactcattcccgatcgatcgatcttaaaaaaaaactaatcgtaactattctctctctctcctatctgtagaactagcaggtagcaactgcttcgagtgtagtctggtgaacgtacgatctttagatcggtcatcaagatgaccgtgatcgacggcgccggcgctgccgacgccggcggcgcagccgcggcgagggtgcaaccggggaacgggcagaccgtgtgcgtgaccggcgcggacgggtacatcgcgttaaggctccggaagctgctgcttgag

SEQ ID NO: 40109 - DNA, 390 bp, Oryza sativa
  Clone ID: uC-osroM202024g08a1
atcaacttagaccttgttcgattaactccttacaaacattgctgtagtcaaaattttgtaaggattttttattggtgtagtaaaaattttggaagagttatttaaagttcgtatagcatcctaaaaaatattaagtaccgaatgtttgtaattaaacataagttgtcggcggggccgcaggcgcagtgtcgacgacaggagctgatccggctgccgaagaggtctccttctcggcgggtgatccggccgctggataggtgttcttatcggcggttgatccggccaccgcagaggtctccttgttggcggttgattccgctgctggagaggtctccttatcggcggttgatcccgcttgcccaaaagtcgccgtgtcgcggttgattcaac

SEQ ID NO: 40110 - DNA, 289 bp, Oryza sativa
  Clone ID: uC-osroM202024g08b1
ttttaaatccctcacacaaactgccacacatatcaagaacaaaaccaaatttctcttaaatatatatagctttaatggagggcgaacgatcctacgtcactccgccgccccctccgccgtcgacgccgtcgtctacgacgcacgtcacggtgatcgtcatcgtggtcccgatcgtgggcgtcatatgcctcggactcctcgccgagcttctgttcgacatcttcaggaggcggcggcgcgcgcggagcgactaggaggaagaggaagcgaaagctgaggaagtggagga

SEQ ID NO: 40111 - DNA, 188 bp, Oryza sativa
  Clone ID: uC-osroM202024g09a1
catatgtgggggtatataatatgttactctttgttcggtcatacagacgattcgacgaatttttgagcactaggtatttagcaaaacctttcatttattccgaaggctctttccatattcaagtgtaggaaggcggaaactggggggaaagggatttttaaaatgggaagaaaaaaaatgtcttcagg

SEQ ID NO: 40112 - DNA, 510 bp, Oryza sativa
  Clone ID: uC-osroM202024g10a1
ttgtttttgtgaacatagagaacttcatagaaatacttattcggtcactctggtgcacatgtaacaacaacaggggtgtattacagggcttcagaccagacaaaccagcgaacactactactttggttttacagcacggtaaacactaacacgatatggacatttttcctgctcttttgctctgctgttttcctcatgctcggatggcaatcccgccctggacctcgccggcctcctcctccgtcttctcggcggcgagcaccggcaggtggcccttctcctggaggcacttcaccgtctcgtacagcgactggctcgccggccggaactccagccccaggtcccggagcttctggttcgacatcttgtacggctgcttcctggggttcttctcgtcggagcacctggtggggacagggtactcggggaagagcttggcgaggatgcggacgacaccctcgcgtggaggacagacttcgcgcataggaagcctgccgcggcggtagggga

SEQ ID NO: 40113 - DNA, 358 bp, Oryza sativa
  Clone ID: uC-osroM202024g11a1
ttgtttttttttttttttggggttttttttttttttttttttttttttttttttttttttttttttttttaaaaaagggggtccccaatcccaaaacctgggaggctcccaaaacccccccgttaccgggaaccctttgaagacaggcaaaaccctgaaacgaacccggagcaacccaaaagcccgaacctgtccttctaagagggctcccccaggcaatggggtgccgaaccctttacttgtttcccccccaaaataaaaacccaaccttgggggggccccagggcccggccctcggggggtccccaaagggcccaccggggcgcatcccgacccaaaaccgcctggggcggttttg

SEQ ID NO: 40114 - DNA, 460 bp, Oryza sativa
  Clone ID: uC-osroM202024g12a1
agagtattaaggaggtcgattacatcataaatacaagaggggcaaacaaaaaatgttcagcaacatagagcctttctcatggcaaaactgttgtataagtgcacgcaatgctttatttccgaggtatacaagcatcgtgagagatgtggcacattgcatctccctatctatacggctatatatggtgccaccagattctacaaacatgcaggttagtagtggcacccagcaccaatgaccaaacacatcggtgtgttggatttggataccatgcaacggatgtggggcaaatttacaatttacaggttgccccaaaaatgccgccagctccagcctccttaagctatagtattatgttgtgaattgagttactgcatgctattccagagagcagagaatttatgccctcaatgatgcattggccggctgtcaagttgccccgctcattttcctgaacttc

SEQ ID NO: 40115 - DNA, 308 bp, Oryza sativa
  Clone ID: uC-osroM202024g12b1
tttatagagcgcgagcggccgccctgccttttctccattgtatacgactgcatatacatataaccacagaagctaaagcattgctctcatctcataacgggtagtgccgtgcctatacgggggatcagcaaaagatgctactatgacacataacctcactctgctatattaccaattactcccaattaccagttgccgattgcaatatatatatactcactgacctaccttgctagagcatttagtaacaagctaaggagaaagagagaaaaaaaactaacaatgacccaagtttaagggaggaagaa

SEQ ID NO: 40116 - DNA, 288 bp, Oryza sativa
  Clone ID: uC-osroM202024h02a1
gatcctaaacaaggccactgacaaaatagattggcctaatctaaattgggcgcggcaaagccgcacgttgtttctagtacattctaagaaacaatcaaattgctcagaaaatacatgcctttctttttcctccatctataaacggcagcagcactaactaatgcccacgtacctttgtacaccaatgttccagttcttgatggaactttacacagaaagagttgctaaccgatgctaaaattttcttggtctatataagagcgcctgcgattattttggtggtttttt

SEQ ID NO: 40117 - DNA, 310 bp, Oryza sativa
  Clone ID: uC-osroM202024h03a1
ttggtgttttttattttttgggggcttttttttttttttttaatatttgtttttttttaattattacataggtggatagtttttttttttctttcacaaaaaaaaaaaggggggcccccgggctaatccggaaaaaaaaatagggaaaaaaaaaaaactccacctggaaagggggcgagaacaagcctgaaaaaccaaccccaaagttaaggggggggggccaaaaaagggggggctaaaaaaaaaaccaaaattaaccaaatttcccccggaaaaaaaattaaaggggaaacacaacccggaagggaaa

SEQ ID NO: 40118 - DNA, 480 bp, Oryza sativa
  Clone ID: uC-osroM202024h04a1
ttttgtttactcaacgaaacgcatactcatcaaaacttgcacagtcaaaatggacggatgtactttgacataacatatgcttcgccattacaagccgctctgcagttcaactacttgaagataagaggcactaatgacaggcatcactcaaaaataaactcaaactagcacttctgtgaaggataataagatgggatgaaaaatgcttccagaacaaccagtcccagacccagtttttggataagtagcaacatccccttttgatattttaaatcttggtgaacgcaacgatgtcgcagctatggacaaattcgttgatcggctcttcagccagatgttcttcgataaggctatccacagacaccaagtcatgaacaatggtcaacatgatctgcaactttttgatcccgtaacccacaggcacaagctttgatgctccccaggtgagaccctccatctgcacactgcagacagcctgct

SEQ ID NO: 40119 - DNA, 414 bp, Oryza sativa
  Clone ID: uC-osroM202024h04b1
gttctgattccgccgcgtcgtagcagcagggcggagccatgtcgtccgggaagggaggtggaggcggcggcaagggaggcggagggaagaagaaggaggtgaagaaggagacgaagctcgggatggcgtacaagaaggatgacaacttcggggagtggtactccgaggttgtcgttaacagtgaaatgatcgagtactatgacatatccggttgttatatcttgaggccatgggcgatggagatctgggaattgcttaaagaattctttgatgcagaaataaaaaagctgaagctgaaaccttattatttcccattgtttgtcactgagaatgtcctacagaaggagaaagaccacattgagggctttgcaccaaaagtagcatgggtcactaaatcaggaaaatctgatctgg

SEQ ID NO: 40120 - DNA, 527 bp, Oryza sativa
  Clone ID: uC-osroM202024h06a1
ttggtttttcccattttcttgggtaggaggaaccaagaccaagttttgcccttcccccatcaatgtcgtgtctgcaggacttattcaccttcaatgtctttgcaatctctttcagggcctctgctgtcgctttcttccatatatacatcctacatgaacatatggacgagggacgaccttccgcacgtgcaaatcagaacaaggttaaagaaacccctagccaaattgacaaatgaacaacagctgcttccatgtccaatgattgttcacaccaaaacacctgaagttatgtgcattttctgaactacaaatttgttcagtcatattcaatgtccactgctgctacttgtctcatgggcacaaccatccttgattgcttcttgagcttcattctccatgcctaaagaaagcagagcagcagcctgaagataaaatgcagttggccatgttggagatattactagcgcttgcatcgcatcactgagagcttgttctgccttgtcattcatcagatatgacaggcaacg

SEQ ID NO: 40121 - DNA, 203 bp, Oryza sativa
  Clone ID: uC-osroM202024h07a1
agtactaacaaacacagctcttaacacttacttttagatagcacatcttatttcttctttttatataaccactggctagcacatggctgacgaagatcgaccatcctccatcatgggattattcattagcgatgctgctcctggctcgtcgttacagccatgtagacggtgggggagtccccttcggcggtcaagaggttgcc

SEQ ID NO: 40122 - DNA, 423 bp, Oryza sativa
  Clone ID: uC-osroM202024h08a1
gtgttttttgataatagaggacaattgaataactaatgaatattcgcaaataataaattattacagaggtggatagttcctctcaatcaaaaataacattctacgcagcggaaaacaaaactaaaacaaactacggaacagctatggcgactcaactccacaggcatcttaaccgagaacaagcctaatcctccagatcatcaccttcactgaagtactcctcttcttgggcttccgcaaacgcttcggaaccttcctcaacggaaacgctctcctccggaacgtcggaaacacgacgagaaacgatgcacgacggcggccggcgacgaataggaaggcggcggcggttcgggtcgacggcgacgagggggctccggtgatcggcggcgaaaacggaggggcggtcgatctttctcgcaccac

SEQ ID NO: 40123 - DNA, 334 bp, Oryza sativa
  Clone ID: uC-osroM202024h09a1
gtgttttttgatatttggggggttttttttatttactgattattttcatttttttaatcattacataggagggaagtttctttcaagcaaaaataacattctacgcagcggaaaacaaaactaaagcaacccacagaacagcaagggcaaaagaactgcacaggcaccttaaccgagaacaaggctgatgctccagagcaccacccagactgaagaaccggacctcttgggcgtccgcacacgcttgggaaccccccccaaaggaaacgctctcctacggaacgggggaaacaccaccagaaacgatgcccgacggcggccggcgacgaacagg

SEQ ID NO: 40124 - DNA, 327 bp, Oryza sativa
  Clone ID: uC-osroM202024h10a1
ttgtttttttaattttttgggtttttttttttttttttttttttttttttttttttttttttttttttttttttttttttttttttttttttttttttttttttttttttttttttattattttattctttacgacaaaaaaaaaaaaaaaaaaaaatacaaggaaaatcttaaaaaaaaatgcctctttaaattatatagggaaaaaaaaaaaacagaggcaaaaaaaaaaaaaaaaaataaaaaaagggggaaaaaaaaaaattgttaaaacccaaaaatttgggattaaaaatataattcattatagataaaaacagcgttaat

SEQ ID NO: 40125 - DNA, 70 bp, Oryza sativa
  Clone ID: uC-osroM202024h11a1
aactggaccacaaaaacacacttgaagcttggagttcattcaatgaaaatcattgggggggggggggggg

SEQ ID NO: 40126 - DNA, 475 bp, Oryza sativa
  Clone ID: uC-osroM202024h12a1
ttgtttttttatttcatggggctctttttgtatttcctttgcttaaggacgacacagtcagggtgttacaacaaatgaaatgaagattacatcagttgcacttcttctcaaacagctaacccttttggaagtcactgtacagtgagtatctcctccaatccccaagtccatatttctctatacgtttgagatgttatgatggtgtttaaaacggccaaattttggttatctttgcaatgaaaaactcttgcgaatagttgggatgatctgatttggcagctcggtaccccgcaggatgagatacaatacaaaagaagcataagcaagtactgccacgcagagaattgagccagataataggcctcttatttctgaagagaagaaatccagcaagagatagccattgatcgggccaatagtgtccccactgtccaggtcacagcttgagtatttcgacctatttaaatacccccat

SEQ ID NO: 40127 - DNA, 311 bp, Oryza sativa
  Clone ID: uC-osroM202024h12b1
ttttacgttcttcacccccacagaagctcccacctgatcgttttctttaagtgcgccaccatgtcaggcggtctctacaaccaccagggtttcttcccggcaagtaccctctcgccccagaataggagcaaccccgaggccgatagccagtacttgagcgagctgcttgcggagcattacaagctggggccttctatgcatgtgctgccgatatttctcatgctgcttcacccaaaaatcatgcgggtattaaagatggcaaaccgcccatggttttaaagaacttttgtacaaggcttagtttttaaaaa

SEQ ID NO: 40128 - DNA, 248 bp, Oryza sativa
  Clone ID: uC-osroM202025a01a1
cataaacaaagtgggttaacacacaccacaagttactaacactccaacatttaatcaacctcataaataataaacatatacttaccaaactttttgtggtacaactcaacctatcatacaacgaaaagactaactcactccacatacttcatagcaatccaacaaaccaaataccattcctgacatacaaacaccttaaccttcaacccaatccgccaaaaacaatacaccataaacatccctccctg

SEQ ID NO: 40129 - DNA, 502 bp, Oryza sativa
  Clone ID: uC-osroM202025a02a1
cgatttggtcgcccttcctttttttttttttgggtggattcttaaataagggggggtgaatcacaccaaaggtgaccaatactacaatattttatcaacctctcagaaaataaacaggaaatgatgattttttttgtggcataactaataagttcatacaattgagtcactatctcactctaggttatcctttacaagccatttaattgaatagtagtgttcacagacaagctgcagagcttccaaactgctcgacgtcaaacagcaaacaatatagtactaccttgatagcaagatgtcgcattggcatgtgatattccaatgtcattgtctaagacaaggattttcccacatttttcccaaccagagaatctggtaatctgctgttgatgagatcccgcagttcaaactcactagggaacctctgctcagctaattttgagaaaaccaaatctccattgcagtaaacttcaaaggcaccagaactttgtaggaaagattg

SEQ ID NO: 40130 - DNA, 336 bp, Oryza sativa
  Clone ID: uC-osroM202025a02b1
gtttttcatggtgagtagccaggattacccggactcggagttctggaaggcgtacctcatgtgcaaggccacgttcggggtggtctgcgacgagctagccgtcgtcgtcgccaaggaggacaccatgctccgtgccgacatacaaaagcgcaagcacgtggccggctgtgtgtggcacctagccacaggtggagcccttgaggctggagatcaagctgcttctgtcttggaagcttcacctgccacaagctcgtgctgcaagtctgcgcccagctcaaggccattgtgatgcccaccgtgaaagcactgatccgaggccggcaacagcgcaaaaca

SEQ ID NO: 40131 - DNA, 491 bp, Oryza sativa
  unsure (1)..(491): unsure at all n locations
  Clone ID: uC-osroM202025a03a1
cctttttgtttttttgggcgggcaataaaaatatgggtgcatccatttctcaaactactacaagaggtctagaggaacacataatcaggagggattgcgacaatttacagcaacaggagtctggagatcgaggcaagaacanacagtgcagcagcagagctaccctcttcatttccactgaatttttacacatttggaatccatggaaaccgagccttccctcccgtcgtcgtggtgtcaccggagtccgatgagaaaaatggtcatggcgtgctcataatccggatcgctcgccggcgtcggtgaaggaggcggagcgattgttcgggcggctgctgaggagtgggttcagagccttgacgacgatgctcatgttgggcctgaagtccgcctcgtactgcacgcacagcgcagctacggcagccatcttggcaacagccttgggaggataatccccttcaagccttggatccacgcattgcttcaccttg

SEQ ID NO: 40132 - DNA, 137 bp, Oryza sativa
  Clone ID: uC-osroM202025a03b1
ctcctatcggcgcactggccggaggatgtggatgatggctgcccgacgcgacttgatctcactgactgatgaagtcggtgagggaggagccgaccgctcgactccgtcatggagaagtggagccattttgatgaacg

SEQ ID NO: 40133 - DNA, 488 bp, Oryza sativa
  Clone ID: uC-osroM202025a04a1
caggcaacaacggggttcattttatcagcctgaagaaaagaaacaatctgatgctgatgccatcacgaacgaacgaaggaagccaattactagcagtaacaatccggctgtaacagccggacgacgatggacagtggcactgacagagacagtgacacgccaccacagttcaaagaaccggtacacactggagtacggtacatacaatgtcatcacataggcagagaccgcagctgctgaattcatggcgatccaatggaccaccctgctgatggctgcagcatcaccaggacatgaactcgcaccattataacacgagacaagggccaaaaatgggggcatgattcatcacacagaggaggaggggtcaggccggcgcatagctcacatgccatggcaggctaactttagaggtgacgaacatgaacccccgttcacatctctgggtgatggatgccttaaccacaccaacactcactgtgtgattg

SEQ ID NO: 40134 - DNA, 292 bp, Oryza sativa
  unsure (1)..(292): unsure at all n locations
  Clone ID: uC-osroM202025a05a1
cgatttagttgcccttccttttttttttttttgttggtttaatacaacattgggtgacaaaaccacccagcaccgggcaaatcagacagctacaaagcgattgataaaaacaaaaacttcgggccagcnaatgttcatcagctaatattcttcacgacaaaaccaaggccctggcttattaaaacaaggcttttagatcaccaccgatttattgtgcccccatgttcgatttatcccaaagggaaaaaatcctgaaattccgatcccaacttgtgaatgcttttagagcctc

SEQ ID NO: 40135 - DNA, 446 bp, Oryza sativa
  Clone ID: uC-osroM202025a05b1
attgaaaagattttatcattatagccatcctgaacaaaacagaatgctacaaacatattcacgagagacactgctttggagcctctaatcagctggttttcttttgccagtttcaccgcatgggtcccataaaccagctgagtgcagcccagaacagcactttctaatattcgaagaagcttcgatatctaattgttataccactgtaagactatacaggtctattgatcgatatctcttgtcccagtaacatcacgagcggaaatttggtacaaaacttctgtcatttttttgcaaccttgggaggtggcgaaaatgacgatgaagatgaccagatagaaaacatgctattaatagctctgtctttgctgaatgccttgcgcacattcttctttaacttacagaacccgattcttttaacattttgctcataaaagtggcatttt

SEQ ID NO: 40136 - DNA, 314 bp, Oryza sativa
  Clone ID: uC-osroM202025a06a1
gggggacaagcttctcaaaagattactgatttgtaagaacatgtagtagcaagtacaattaaatgaatagcctttcgatccatgcccaaatatttggaccgaacgaacattgccatacaaagtgtgcaacatccttcctcgcatgttgctacaatcttgacaaaccgatcgaattcagttttcaacctgattttacactctttttcatcaactttacagaaccgtggatgattttttggttacaccggccgcagcaaagtgggaggggggaaaagaatacgcggtgttagaatcccggacaaaaaaaatgtaat

SEQ ID NO: 40137 - DNA, 429 bp, Oryza sativa
  Clone ID: uC-osroM202025a07a1
gcacgcacactacgcagcttgctcctattattgcccccctttttttttttccttgcagtgttattacacatatgggggatacccccaccacaagttgataacatacctacatagatgcacgtgcctatataatacaacagtgtccagtacactatataatgtgcagcacaacataagaaaatatgatatggcttaatcgaaacacacacttggaagggcatctaacataccccatactgtacgtcagatgcaaaaacctttaccgcttggtcgatcggtcagcttgcgtccaccaagaagaaccctaaatgtaggggctatagtgcatcgtactcgggtcggacaggaggaaaattaagttgctattgagcagcatatccggatccatggtattaggaaatatccctttcgattttaggctcttcaaat

SEQ ID NO: 40138 - DNA, 461 bp, Oryza sativa
  unsure (1)..(461): unsure at all n locations
  Clone ID: uC-osroM202025a08a1
aaaatatggttggatacatatctcaaactactacaagaggtctagaggaacacataatcaggagggattgcgacaatttacagcaacaggagtctggatatcgaggcaagaacaagacaggcagcagcagagctaccctcttcatttccactgaatttttacacatttggaatccatggaaacccagccttccctcccgtcgtcgtggtgtcaccggagtccgatgagaaaaatggtcatggcgtgctcataatccggatcggtcgccagcgtctgtgaaggaggcggcgcgattgttcggacggctgttgaggagtgggttcagagccttgacgacgatgctcatgttgggcctgaagtccgcctcgtactgcacgcacagcgcanctacggcagccatcttggcaacagccttgggaggataatccccttcaagccttggatccacgcattgcttcacc

SEQ ID NO: 40139 - DNA, 455 bp, Oryza sativa
  Clone ID: uC-osroM202025a08b1
atccaccgtctcaatctttgtagtaatcctcgcggcctcgccgttagttccaccaccgggcgccaccatgtgcgggatcctggccgtgctcggcgccgccgactggtcgcaggcgaagagggctcacgtcctctcctgctcccgcaggctgaagcacaggggacccgactggtccgggttgtaccagtgcgagggaaacttcctcgctcagcagcgtctcgccatcgtctccccgctctccggcgaccagccgctgtacaacgcggaccggaccatcgtcgtcgtggccaatggagagatctacaaccacaagaagatcaggaagcagttcgcctccaagcacacgttcagcaccggcagcgactgcgaggtcatcatcccgctgtatgaggagtacggcgaggactttgtcgacaatgctggacggcgtgttcgcctttgttctctaccacacc

SEQ ID NO: 40140 - DNA, 383 bp, Oryza sativa
  Clone ID: uC-osroM202025a09a1
gacacccccaaaacctttaattttaaaaacttgacatgggagatttcgactttaaccagacctcccctaaaaatccatcccccaacgggctcaaacgataatcccatttcccccggggccccccccgaaaaagtacccaacatttaatccgggcccaacccccccgatccaacttttcacgagcgcccccccaaaccccggagcggggggggcggacccggaaaaaccgcccaacccttccccgccggcccccggggggtatccccatccccccggagttccccccccccccctggaaatggaaaaaaccccagggaagacccaccgcccccgggggagtgaaacccccggccttttcatccaaataacaataaacaatcccc

SEQ ID NO: 40141 - DNA, 461 bp, Oryza sativa
  Clone ID: uC-osroM202025a09b1
ctcccatccccatccatctctcccccctccctttcctcctaaacttcagcggcgacacccctcgcgagccgctcctcctcatcctcctccgccgccgccgccgcgtcccctcggtgcccccctctccgccggccgccgatccggccccgcgagttgtaggaatccttgataaggctgatggcttcgatggatgagcctctttatcccatcgctatactgatagatgagctcaaaaacgaagatattcaattgcgtctgaactccattaggaggctctccacaattgcacgagcacttggagaagaaagaacccggaaggagttaattccttttctcagtgaaaataatgacgatgaagatgaggtgcttcttgctatggctgaagaattgggcgtgttcattccttacgttgggggtgtagaacatgctcatgttttgctaccaccattggagacattgtg

SEQ ID NO: 40142 - DNA, 475 bp, Oryza sativa
  Clone ID: uC-osroM202025a10a1
gggtgcataataaaaatcgggtggttcgaccaaactgttcaaatacaatgttgagagaattgcttttacatgcataaacaaatttggccaaaaaaaagaaatatactgaaagcagcacaatactgtttgccatgttaccgcctacatcgaaaatgtatctagtctacagcaatacactaacaaatgccctgcatggcatggcaccaacgttctgcaactccagcagtggttccatatagcagtggacaagtctgcagtagcagcacacggcgtatgctcctgcacctccatgagaagggtaaagaagaggaaaagactccaaaacacaaaggaaactcttaactggataaaatctcaacccagttattaactttgagaggttctctgaaacttacccacactcagattgagcatcagagcacacgtgcacatcatgtcaagatcccatgtatagcatggtttgcacaattgcata

SEQ ID NO: 40143 - DNA, 430 bp, Oryza sativa
  Clone ID: uC-osroM202025a10b1
ctcgccgctgattcgattcgatccgatccgatccaaggggaggggaagcaatggcgacgaagaggagcgtggggacgctgggggaggcggatctgagggggaagaaggtgttcgtgcgggccgacctcaacgtgccgctcgacgacgcccagaagatcaccgacgacacccgcatccgcgcgtccgtgcccactgtcaagttcctcctcgagaagggcgccaaggtcatcctcgccagccatctgggccgtccgaagggtgttacccccaagtacagcttgaagcctcttgttccacgcttgtatgagctacttggagcctatgttgtgatggccaatgattgcattggtgaggaagttgaaaaattggctgttgctttgccggaagggtggtgtttttcttcctagagaatggtagattttccaggggg

SEQ ID NO: 40144 - DNA, 466 bp, Oryza sativa
  Clone ID: uC-osroM202025a11a1
gttgagaccccaaagcatgggggtctcatccgaactgatttattttggtcggacaacaaagtgccgttctcggaagtcgaggaactgctgagcacatagcaatgaaaaattaaacacataacaacagttctgataccgataccagtaacacaatagacggtagttctgataccgataccagtaacaccatagaagatagtcctcgtgacctcgctaccagttggtaacgagtaacgaccctgagcagttccggtagacacttgggttacagatacaggaggaaggaccatcttggtccaacattttggacatgatgagtgaagcggacgcaataactatttatacctccaaaggtctttcaagcatagatcacgacgatgaccatagacagacacatgactgacgggacgggctacatttgttggacttgtgccagacttcaacactgggatatattcaaccacat

SEQ ID NO: 40145 - DNA, 326 bp, Oryza sativa
  Clone ID: uC-osroM202025a12a1
tttttttggtgtttttttaaaccttgggggacaagcttctcaaaagattactgatttgtaagaacatgtagtagcaagtacaattaaatgaatagcctctcgatccatgcccaaatatttggaccgaacgaacattgccatacaaagtgtgcaacatccttcctcgcatgttgctacaatcttgacaaaccgatcgaattcagttttcaacctgattttacactcttcttcatcaactttacagaaccgtggatgattttttggttacaccggcagcagcaaagtgggaggggggaaaaagaatacgcggcgtcagaatcccggac

SEQ ID NO: 40146 - DNA, 314 bp, Oryza sativa
  Clone ID: uC-osroM202025b01a1
atattgggggggcttccaagctggaagttggaacaccaaacaaagtaaaggttgtcacagaaacagcagggagcacctaacccagaaaatttgcctagataggcctgctggcatcgggccaaaggccacactgatacatagttttctcggttgtttattacaggatcatataatactacaaacacggccgcttcttaatgtttttttaacaaaatctatgtttttaaatttcttttaaattcaatttttttttaagtggagttattttgttctttcatccctaacctctttaaccttattgttttatttatttt

SEQ ID NO: 40147 - DNA, 204 bp, Oryza sativa
  Clone ID: uC-osroM202025b02a1
gatggcaatacccctgttaagcgcttgcttgatttagccagagagcgcactatacatgcctccaccaaacaaaacaatctaaaagcatatacctttctaatgaacacagctaataatagctcacgaccataaccttcagtttattcgattcacatgacaacataagcttattggttctctcaactcactgaggatacccttcct

SEQ ID NO: 40148 - DNA, 406 bp, Oryza sativa
  Clone ID: uC-osroM202025b02b1
gggatctcctcttctattccttttcttccatcgtcataagagcagccgcagatcgaattgcattgcagtctttgcagatttcagcttaattgccggacagtgaagtgaaagcatcttcaagggcgtggaagctctctgagatttcaaagggtcacaaggcaggggatgagtacaaccaaagtgaatagacgtgtgggaaagtatgagctaggaagaacaatcggagagggcacattcgcgaaggtcaagttcgcgagggataccgagaccggcgatccagtagccatcaagatccttagacaaggagaaagttctcaagcataagatggtcgaacagattaaaagggaaatttctacgatgaaattgattaagcacccaaatgttgtccgtatatatgaagtgatg

SEQ ID NO: 40149 - DNA, 456 bp, Oryza sativa
  Clone ID: uC-osroM202025b03a1
ggccggggcaatctattgatgctgaaataaatagtctttaacaacaaattctagaatttaaaagttctgcttgagttcatcgaaccaccaaaacaagtagaactggtcaactaacaaacggtcagggatgtaaatgaactagggcgtacatacactccacattcttgaacctccacgactagggtctaaaaaatcatcgatatactcaagcatccctcatatgagctttctggatgcattaaggccatgagcatgtctttacgggctatcaccaatcccattttgctgcatacagaaaagctgatctcctgagaagtacctcaaatcaaagcagaaagctgatctattctcccatcagattgcagggatttccaactattctcagcggtagccccatcctcttccccggcctcccctgccccggcctgttccactccctctaccaccacgggataa

SEQ ID NO: 40150 - DNA, 335 bp, Oryza sativa
  Clone ID: uC-osroM202025b04a1
catgcaactgggggggtaataacaccgaccattaagcacacaatcaaggctgcctatggctcatacgaaacatagcataacgcaattctctacaataatcacaccctgtatttaaaacaagacaacattaatgagccacaataaccaattggaagacataaatccagaaacccctgtataaaagaagattaaagatcgaggtatacgtttaactaacatgactttggactgcacttgttttatgagtagtatgcaccggaacagcgtatgtccaaggtgcagaccaggctgacgtggcctatgccgattgtccctggaggcaagcgccagatgta

SEQ ID NO: 40151 - DNA, 410 bp, Oryza sativa
  Clone ID: uC-osroM202025b05a1
ctctcaaaagattactgatatgtaagaacatgtagtagcaagtccaattaaatgaatagcctttcgatccatgcccaaatatttggaccgaacgaacattgccatacaaagggggcaacatccttcctcgcatgttgctacaattttgacaaaccgatcgaattcagttttcaacctgattttacactttttttaataaactttacagaaccggggatgattttttggttacaccggcagcagcaaagtgggaggggggaaaagaatacccggcgtcagaatcccggacaaaaaaaatggagttccacttccatatgcaccagttttcccaaatggctgcaggcagggttcatctttgttttctaatggaggacggtgaaaaaattcctgaactaggtttcatgctgacc

SEQ ID NO: 40152 - DNA, 435 bp, Oryza sativa
  Clone ID: uC-osroM202025b06a1
atgtaggaactaatttcattggtggcacttaactcataaagcttatatactattttgatgttcaatgagaaaaagggagtgtgcgcaactattttcaaccttttgtttccatctctgtttcatttccggaggaacttcttgaaccaacgggctgagttcttggggtatctcttcattccgttatcgtaatccacaaagtttatcccaaaccgaactgtgtagccctctgaccactcaaagttgtcaagcagagaccatgcgaagtaccccttcacatttgctccatccctcatagcacttagcagggcgagaaggtgcttgtgatagtattcaatcctgatatcatccttcagggcctccttgagtcgcatggtcttattattgatttcatcaacaccattttcagtgatgtagatggtaggattgccatagttt

SEQ ID NO: 40153 - DNA, 442 bp, Oryza sativa
  Clone ID: uC-osroM202025b06b1
gtttttacggagaagtacttggttttgcatgaaattgttgacacagcgatgaagaaactggaggctgaggttggtcctatatctggagttgcaaatatgggtcgtggaattgtgagccggcttgctgttggtgctgaagttcagaaactttgtgctcgagcaatagaaaccatggagtctctgttttgtggatctccttctaacttgcaatttcaacgttcacggatgataccatcaaacttcgtaaagtttgaagctataacccaaacatctgtcactgtagttttggatttgggttctataccttgctcaagatgtaacatgctttaatgtatggcacagagtggcagtcacaggctcgttctcatcatggacacctgggatgacacgtggaccatcaaaaacgttagtggtcactcaacttgtgccagttacaagctat

SEQ ID NO: 40154 - DNA, 333 bp, Oryza sativa
  Clone ID: uC-osroM202025b07a1
aaacaactggttgattgcttcaaacaatatatttccaaattaaaccttaaagctaaaacaaaacaagtaactcggtccccttttctattcacactaagcttttgtttggacttttcccgggccccacgggaccccaaaacctcatgctttgttatttattcagacaccaaaattttttggtcatggagttcgagctcatttacagtgattgcaaccaagcaagatttatctctggtcactaatcattcaacaaacagaactggcacccggtttctgaacaggtttactccagttcctttgcaaagtccatgatgtcgacaaacaccgatttcc

SEQ ID NO: 40155 - DNA, 488 bp, Oryza sativa
  Clone ID: uC-osroM202025b07b1
cttttctcttctcgtcgccggtggattcgccgccgcctccgccgccgccgccggaggaggaggacgaggagagggcgctccctcgggggtgagcatccagccacctcggcccgttgcctcctcttcgcatctcggccccgcgagattggaagtgagggcagggcagggcggcaggggccatggcggtcccactcgtgctcgtcgtgctcccgctcggccttctcttcctcctctccggcctcatcatcaacgccatccaggccgtcctgtttctctcgataaggccgttctcgaagagcttgtaccggcggatcaacaggttcttggccgagctgctgtggcttcagctggtctggcttgtggattggtgggcaggagttaagatacaactgcatgctgatgacgaaacttacaaggcaatggggaatgagcatgcacttgtcatatcaaatcatcggagcgatatcgattggcttattgggtggatt

SEQ ID NO: 40156 - DNA, 236 bp, Oryza sativa
  Clone ID: uC-osroM202025b08a1
aaaccaaaaattggcccaaaccccccgaaccgaaaaaaacggccccccccacctcaaaaaaccttttttgggttccggccaccccccacaggggaccgtttttttcaaccctaaaaggaaccccccttgggggccaccccccccaaaagcccctcaacaagtttgttccaccccccaccctctttagaggggcgttttccctccggtacggaagccaaaaaaaaacgcttttccct

SEQ ID NO: 40157 - DNA, 311 bp, Oryza sativa
  Clone ID: uC-osroM202025b08b1
ctgctgaccaagctctttttttctcctcctcctccttttcgtcctgacatcctcatcacccccctttgcaatttgcatcatcatcctcacctcctctttggtttaaataccctgtcttagcagcagccacagcacagcttccttcctgcactctctgctctccttggagcttttctttctcaagagacaagaaagatttcagaatctttggatggggatctgtgcatcttcagagcagctggagcatgttcatgagacagatgagagcattgggtatgtgaaggatgagcaaggaagggggggtagggggg

SEQ ID NO: 40158 - DNA, 445 bp, Oryza sativa
  Clone ID: uC-osroM202025b09a1
atacagaaatggggggaaactgaattatcaaattattggattgacaaacgtagaacggtgtcatcactcatcacgggatggttacaaaacctcttgtgttcttgagtaaactagctgattgctatgtcaatccctgtaaccacaaaagcaaatagcagaaagaaaaaaaaaagatcatgccgggcagtgggatacatgtttggtcaacagaatacccaactaacgaacttccattgccatctcttgctgatatcgatattgccttttctttcatttctttctgttttccattcttggagacaggcattgcgctactgactataccccaattgctcgtcggggtacgtgggacaccctttaagaggagaaagtccaaaggatgttcttcttgatgacgaattcatcggctctggaaggactgatcgacttctccaacatgcgttga

SEQ ID NO: 40159 - DNA, 175 bp, Oryza sativa
  Clone ID: uC-osroM202025b10a1
ccctccttttttttttttcttgttgctttataaaactttggtggcaccacccaccacattaatacccacaacaaacactgtctataaatctcaataaacaaaatatcctttctacccatacaccaaccattattgacccaacaaaattaagacatcaaaagagcatcaacaaaaa

SEQ ID NO: 40160 - DNA, 400 bp, Oryza sativa
  Clone ID: uC-osroM202025b10b1
tgttagatcctgcacatccaaggcgggcaatgtggcaaccagatcggtgccaaattctgggaggtggtgtgtgatgagcatggcattgaccctactgggcggtacacaggcaactcagatctgcagttggagcgtgtcaatgtgtactacaatgaggcctcctgcggtcgctttgtgcctcgtgctgttctcatggaccttgagcctggtactatggacagtgtccgcactggaccctatggccagatcttccgccctgacaactttgtcttcgggcaatctggtgctggtaacaactgggccaagggacactacactgagggtgcccagctaattgattctgttttagatgttgtgaggaaggaggctgagaactgtgactgcctgcaaggattccaag

SEQ ID NO: 40161 - DNA, 469 bp, Oryza sativa
  Clone ID: uC-osroM202025b11a1
catgcacacgtcagcttgtatgcctccatgtttagtcgccctcctttttttttttttatgatggatctaaaaaaatttgtgggactaaactcataaagtttcaatactttattaattgatcaagggagagaacggagggggaggtaaaaatattataagtaaataagtcgtaaaaaatcgatcagctggaagaccttcttggcctactaggtgatgtcttagggccactctcggtgggcgactcgccaggaggagggcttgcggcggtcgccactcatgacccgtaatgagcgctactcgccggagaggttggcctatgccttgcaccgctggacctttgttccctgcatcatagtacacttcacccgcttggtgcccttgacctacagcttcaccacttaccccgtgcctcccacgttctttaccatcaccatgttgtacgacgggttccccaacatcgtgtacttta

SEQ ID NO: 40162 - DNA, 370 bp, Oryza sativa
  Clone ID: uC-osroM202025b12a1
aaatattattggtggtttttatcttatattttttatattttatttttttttttatatataaaaattttatttttttcattttaggctaaggggaaaaatatcatttatgtttcattggcaaacgaactaggggaaaaaaagaaaagaaaaaggggggaaactaaaaattaaaaaaccccaaaacacaattttcacccgaaaaaaaaaaggggtggccctacgaccagtcaccccaatttagggatacacgacgtgaaaaggccctaaacatgtgacccatgcaccataaaaaggaccagggcacgcaggtttttttccctagcaaaaaaaaaacaaaaaatgctttataaactacaaaaatggggtgaaa

SEQ ID NO: 40163 - DNA, 337 bp, Oryza sativa
  Clone ID: uC-osroM202025b12b1
gaaccgtaaaatagtatcatcaccatgttcatctagacatagtagaaaacattcacactctcgaaatgctctctatctttcagttttgtgttgctatacgtcttcttgttttgcattttttttagtattccatttctgttcagcagagtggcagtggcgcgccattccattccttgaggcattcgagcagcgggtcgatgtgcttgcgctcgttgatggcgacgagcaccttgttcagctccttgccgggcgaccgcgttttctcgccggtgaggttctgggtgccaacctttttgctcaaaataccggtagagcgggtacgagcggctctcttttg

SEQ ID NO: 40164 - DNA, 246 bp, Oryza sativa
  Clone ID: uC-osroM202025c01a1
gtggattccactataacgggggtacataaagcatttcatcagaagtgcagttcaactgctgaataagcaggtacagagctgaatatcgatggtttacaaattccctctccagcttatccagagtaggatcttatcagatacttctgagctgatatctcagcgttatcagaggacagctgaagtaaaagcttgagatatcaagtatcatgatgtctatgtacaaagccatgtttaagatctatcaat

SEQ ID NO: 40165 - DNA, 214 bp, Oryza sativa
  Clone ID: uC-osroM202025c01b1
aattttatgttttcttcttatttttttctttttttttttttttatttttttttttggccaaaaatacgaaactgaacgcttgtgttagcccaaattgactggcctttcgggctgcgttgccccccccctccttggtttccattgtagggggcgctccacccggtacaactccttcttttcccttgtgggagtgtttttcccacatttatctcgc

SEQ ID NO: 40166 - DNA, 220 bp, Oryza sativa
  Clone ID: uC-osroM202025c02a1
ggggaaaatgatttgagaactggtattatactcatggaagaggcatctgaatttctcatgtactatacaacctgtcactcctgtgtatgaaatggcagagggtccatccatccacatagaaaaaggaatgggtgcccttgcgccgtaaacagatgctaatcttccatatgtacattacgattttgctttttcttttttcactttacaagttacagatctt

SEQ ID NO: 40167 - DNA, 522 bp, Oryza sativa
  Clone ID: uC-osroM202025c02b1
cttttctcctccgcctccgtcgccgcgacgagatggaggtcgacagggccgcgagcgccgccgctgcgggggagtcctcctccgccggcgcgatggcggtggagaagccgtggttcgaggcgctgatgccgagcgagatgagcggcgggaggccccagttccggaaggtgccggtgccgcagcaccgcttcgctccgttgaagaaggcgtggatggacatctacacgcccgtctacgagcacatgaagatcgacatacgcatgaacctgaaggcaagaagggtggagctaaaaacaaggcaagacacaccagatgtgagcaatcttcagaagtgtgcagacttcgtgcatgcttttatgcttggatttgacatcgcagatgccgttgcattgctccgccttgatgacttgtatgtggattcctttcggatcaacgatgggaagacattcggggtgagcatttgcacgtgctattggccgtttgcagggaaaggaggcacgaccaataccgcatttgagaatt

SEQ ID NO: 40168 - DNA, 71 bp, Oryza sativa
  Clone ID: uC-osroM202025c03a1
ggcagggattgaaccagataggagatataaccactaccatagtgcttcacgaaacacaggcataacatcag

SEQ ID NO: 40169 - DNA, 399 bp, Oryza sativa
  Clone ID: uC-osroM202025c04a1
ggatgtaacgtccagcttacgtggcagtaacacggcccattaagcacacagtcaagcctgcatatgtatcaaaagtaacataacataacgcaatactaaacaataataacaggctatatttaaaacaagtgaacattaaggagccacaaaaaacaatttcaacacataaatccggaaacccctctctaaaagaagcttaaagcttgaggtgcaggtttaactagcaggactttgggctccactgttctcaggagcagtaggtgccggaacagcggttgacgcaggcgcagccccggctgcaggggcagaagcagattggtcctgggaggcaccggcagatgtagcttcagtagaataagcggtggactgcacagaggttccactgccataaggatcacc

SEQ ID NO: 40170 - DNA, 421 bp, Oryza sativa
  Clone ID: uC-osroM202025c05a1
ggtgggctacaaactcaaaggggactttgattcaaaagcaatgtgatacaggagaaatcaatccagagaaaggggaaaaagaaacagcttgtacaaataaacaacacgcacgcacatagagagtgacctccagttctcgtacgagcagaaattaaattactgaatcgaacaggaaactcgagtactcgacacaaatctagcttattcacgaatgttaacaaaccaacgatgaaaaataagtcacgcacgcaaaacaaaaaaatacaaatacaaaaacgaacgaaaaacaatcgatttagcgaatcacttaattatgatatgacgatcatatcgtccttgtaaaccgggcgcgcgcgagcgggcgatcgatcgatcgatcgatggatcggatcagatcaaatcagatcattacttgggcatg

SEQ ID NO: 40171 - DNA, 471 bp, Oryza sativa
  Clone ID: uC-osroM202025c06a1
gaggggattgacactactatgcagtctcaaatcaacacatatatataactgatttgatcaagtctggtcgacaaatcaaatggggatggatataacttaacaaaacaaatttacagaacaaaaacaacaacactcgagatcagattacaaatttacactcctgccgtcccgtctttttacaaagacgtagcctatcacctggtcgaccagtgagcttaatttttgcctttccaactcttttcctgttttgaactacttcacccctatttcaacccatgttcccagcccactgataatgtccttgtcctcctgtatatgcttcacccattggcccatgctgctccaaccactgatctcattgcaaacttcagtttctatggccctggtcataggtgacatccctttgctacatgctgcatatcctgcccggtagtatgagagacgattttgttacaagcattcacttacgca

SEQ ID NO: 40172 - DNA, 189 bp, Oryza sativa
  Clone ID: uC-osroM202025c07a1
cataaaaaacgggtgtaacacaacactggcaagaggataaaatggatattcctaattggcctgatagaaaccgaggcccctcccatgggaatagaaatgggctaagggtcctttcttcaaattatgaaaagaaggggttcccccgtgtcactgacaaaaatctatcctgcggaggttacatcacctttg

SEQ ID NO: 40173 - DNA, 415 bp, Oryza sativa
  Clone ID: uC-osroM202025c07b1
ctccctaccaacaaccaccaccatcctcttcttggcacttggcatcaagagacacattcagacgcctcgagttgtagctagcaccagtggctcagcttgcccagtgctgctgcatcgatcagtggcagtagctagctcagctctagccttttgccaccgaccgcttcgatcgaatccggtgctaggctagccagcctcctcgctctttataaccccagccgccattggagagggagggagggagctagagctttgttcttgttcttgcatgctgttcttgatgatcgagtgagagagggggaaggaagaaaggagggaggcacatgcttataccgttcgtgctggagttcctgatcgatgtcgtctgggatcagtgagatccttcttttggggattatgatcaacttcacacttc

SEQ ID NO: 40174 - DNA, 391 bp, Oryza sativa
  Clone ID: uC-osroM202025c08a1
ggaaggtatatagccggagggggcatatatttcattcacatatgcctcacccaacaacatatagtcgtagcagataccactcttacatcaagtcagagagagatcaggtgaaacaaaaacaaaagcagagcacggccggtaaaatcaaaagacgatgaacaaactgggaacacacgaaacaaggtgggagacatcatcgaatcagagatgaacaattaaacaaggctatatatgacgatgacggtttagttgccaccagactcctggcagcccgggggcttgtaggcgatgaagctgatgagctgcacctgcctgacgttgtcgaagccgatgatacggacgaatgcatcagggtacgccttcttggcctcctcgagctccttgagcacct

SEQ ID NO: 40175 - DNA, 469 bp, Oryza sativa
  Clone ID: uC-osroM202025c08b1
ggttgatcgcgcaaagaaccgagaagagctcatctcatccaccatcactcgcgcagagagatcgatagccacagcgcacaagcaacgcgccgccaatcacatgcgcgcggcggtgcaggggcgggcacatgcgtggacgacgacgacgacgacaccgccgggcgcgatgagaggccgggcgctggtcctcgtggccgcgctgctgctgcagctgcttctcctcgccgctgccggtggcgcgggcgcggcggcgacggagaggaaggcgcacaactacgaggacgcgctgcggaagagcctgctctacttcgaggcgcagcggtcggggcggctcccgcacaaccagcgcgtcgcgtggcgcgaccactccggcctcaccgacggcctcgagcaaggggtggatttggtgggaggctactacgacgcccgcgaccatgtcaagtcgggctgcccatggcgttcacggtga

SEQ ID NO: 40176 - DNA, 451 bp, Oryza sativa
  Clone ID: uC-osroM202025c10a1
ggggagattaaagcagcatggggggcttcttaccaccattacataagcttacgcaataacagataacaaattctcctgctcctttaggtaaaatattcaaacacaatacccttataagttcttattattaggaaagcagcgagcatgggcataaatggcattggggggcaggttaagaatcacaatgcttagcagagaggaaacaaaacaccttaatgggacagagcaaaagcctccgaaagggagcttttaggcagaaggcttctcccacttgaggggcttcaccacctcccaggtgaagtctgggtccacccttccgaagtgaccgtaagccgccgtcttgaggtagcgtccgttgccacctttcttgaggtcaaggttgatgatgatcatgccaggcctgaagtcgacaggctccttcacattcttgaggatctccttgtcagggatc

SEQ ID NO: 40177 - DNA, 521 bp, Oryza sativa
  Clone ID: uC-osroM202025c11a1
gggctgaggaaggagaggtggttgcagtggccacatgggacggtcacggtgtccatcagcctcttgcatgggactccaacctgcagctacccaaaagacgaaaaattaattaatcacatcatgcaattaagccaatactttcttcgttaatttcatctctttgttgcatggcactgtccttaaggagaaaaagtagaggagaacagcatatctgtgtggaaggaatctagatggagcaagcaaataaagtgggatatgcaaaacagagagggaaaaagaaaaggaagaagagaagattcagtagtacttgttttttaatggaagaacagaagatgcaggtactactaaattggattcttgtccagtttaaaaatgcagcctgcagctggtaacaatgaaagaaggggatataatggaagcgaaagatggaacatgacactgcgagagaaccagctgagtagaacattctaccacaaagcatcatatcaagagctatggcccatgaatcttatctaagaaag

SEQ ID NO: 40178 - DNA, 442 bp, Oryza sativa
  Clone ID: uC-osroM202025c12a1
ggggggctaaaccacttaggatgcattcctcatctactcaccagaccaaacaattctcaaaaccagaaagattctatcatgtgaatcatttctaagttctaagtgagcttgtatcccaaaggtcatccagcctacttagatgccgaagaccttacataaagtttctgaatattctagtcctcaaggtatgattgttacttgttagagccctactctttctttttgttttgcttgctatctgtatcttcttcacaagcttcctcctcttccgctttggactcgttgtactcaaggagcggttttacttcaccattccacaaacagtgaacagcaacaaaaccaatcacaccaggaacaatgtacaacagagcaggctgtgcagcttggaaccagttcatcactattattggcacagtcagacccacggtataacccaaaatgc

SEQ ID NO: 40179 - DNA, 465 bp, Oryza sativa
  Clone ID: uC-osroM202025c12b1
tgagagcaagcagcgtgtttacgcccaaatcgcgcgattcgatcgaggcaaccctccccaattccctcaaatcccctatccgaaatccgccaattggccgcgtccgccacgccaagagaataaaggaaaacatcggcgtatcaacaagtgaagctgcattttcttagagctcagatgaagcggcctcgaaggcgtctgtggtgggatgactgatgagggatgatagtgacattgatgaacttgttacgggcatgctggagaccatcatccaaccagcatgcccgggcaggctcagatgttgccggcaggcaggatggacttctatggtacaaggacactggtcagcatgtaaatggggaattctctatggctgtggtccaggccaacaacttacttgaggatcagtgccagattgaatcgggtccattgagctttcttgactttggttcatacggaactttcgcc

SEQ ID NO: 40180 - DNA, 367 bp, Oryza sativa
  Clone ID: uC-osroM202025d01a1
cctatttattgccctcccttttttttttttaggatgtttacaaaaaaaagggggtgaaaaacaaaatctcacatactgaacttatgttattcggccaggcacaactccaatgatatcacagaccccatggatagcatctaccttgaacacaactgtgtttttcaagaaaaaacttttatgtaccatttcacctggtccacatttcctactaacacacatgaggcctttcctcacacctactgtaggaaacacaaaccattttttcatgtatctacttgctccacctacgtgggcatgtcaaccctgaatttccactttatatgcccatataatgattaactagagttcaagggcctccaatctatct

SEQ ID NO: 40181 - DNA, 233 bp, Oryza sativa
  Clone ID: uC-osroM202025d03a1
gggggtgcgaacaaaactttcgaacccttttttttccccctggtttctatttcatttcattcccaaagaaagcaacaaggggttcaaaccccattaccaaagggaacccaatttatgggaccctcccgggcgaaaaccccccaccctgggggggggggggggggggtttttcccctgggggggcctcggggccaaaaaaacccccccccctaaaaaaaaaattttcccccccc

SEQ ID NO: 40182 - DNA, 493 bp, Oryza sativa
  Clone ID: uC-osroM202025d04a1
gacacagaagtgatcgagtcatatgcataaaaagctatatacattatagactcgtatacaattacactgccacggtaatatctgaacaagaaaacatagccaggtagaccctggctccctggatctcaatgctgtcgtcgaaggattggccggttgaattgttgtacagggtgaaaaagacccacagatccgtgccaagctgcgtaaccgcaacggtgactgcgacctttttacgtggactcgtccctgcagtgtggaatatcacacgatcttttcccccgtaaagcagctcaatgtccctacatgttggctaaggccaacaagctgatgtgcacgagatccaaaagtctagcaatctaacctaagtggccagaatctgaagattcacaaagcaacacacgatgtcgaagcttttttctatcggagaacgaataggcttcgaccacactcggactcggcacggacgtgttctgttcagtgctgagcgctcagc

SEQ ID NO: 40183 - DNA, 475 bp, Oryza sativa
  Clone ID: uC-osroM202025d05a1
gttgtataaaaactaaaatgagattgtcatagcattcttcatttactcgccctatttgcaacttccgactctgaagaaaaacactgaaaatgcaggttgcttagcctgctacatctgcatccttctcaatcaccgtctgcttagcgacaacaaaagagcaagggcacagacgcagcagctggcatagatacacacaaaacacacacgagttttacaggacaagcctattttagaaattttacatgtactctctcttattgatccaaagggttcgttcatctatctccttcttgtacgctaccttatgctgctgtcagcttcttcttcttcttcttcttcttcagtaactggtgacgatgagcagcccgatcgccgtgacgacgatggtcgacggcaccccgaaccggaggtggctccagaaggagaggttgtagccgaagaactgagctcttctagcctggttgcagacgatgag

SEQ ID NO: 40184 - DNA, 315 bp, Oryza sativa
  Clone ID: uC-osroM202025d06a1
aacccatccttttttattaatttatacatatacttatacatttattacattctaaaaaagctcctcaccccgaaaaaacaccaacaaaccggccctattacacacaaaaaaaccgcaccccaaaaaaatccacccccccacaattaaaacaacaaccaaaaaaccccccccccccttggaaaaaccataaccccccccccctttaccacccaatactttcaaaaaatcccccgacacctaccaaaaaaaatctcccccaaaagcaaacattaaaaaaaaaacaccacccactcctctccccccagcctagaaaaa

SEQ ID NO: 40185 - DNA, 456 bp, Oryza sativa
  Clone ID: uC-osroM202025d07a1
ggtatgctactaaaaaaaaggggtgtgattcaacatctctcagatcgaacttatgttattcggcatgtcacagatcaaataagatcagagatcgcatccatagcatataccttgaacaaaactgtgtttttcaagaaaaaactttcatgtaaaagtacacaaggtcgaaatttggtgtcaacaaacatgtgcagcagccacgaaactacggtttaaaacacctccattttctcatctatcgtctgcaaaagttacttgtgaagggctaccctcaactgtctcattctagatcctgaaaatgattaactcgagttcaagggcctccaatctatttcttcttcttggatttgcttccctgtgcaaatgcagtgccctccagccactcatccatgttggcatcagtagttccagttcccagttccaccttgggggccttccttgctctctttgagagct

SEQ ID NO: 40186 - DNA, 356 bp, Oryza sativa
  Clone ID: uC-osroM202025d07b1
tataataaaaaaaaaaaaaaaaaaagaaagaaggaaaaatgataaaaaaaaaaaaaaaaaaaaaaaaaaaaaaagaggttcgcttttttagatatctcactgccattcttccgcacactttgctccataacttattattggggggggctctttttggggtcccctgtttcctcccgtccctctcccgccctacttctctttttttgggtcccccccttttttattcttggggcggtttttccccctttcggcggggggaaaccccttgggctccccccctttggccgttttgcactaacatccccttttcccctggggggtagtacgcaaggcgcctcctgccttttctctttttc

SEQ ID NO: 40187 - DNA, 177 bp, Oryza sativa
  unsure (1)..(177): unsure at all n locations
  Clone ID: uC-osroM202025d08a1
ttttgtagatttacaaccaatgtggtgcccgcaaaatcaagttatacagtacaatcagttgttcaattattagagggcttnacaatgatgtccaactgatttgttccataaagctggccactactgagatcttcaccatacgttgaacgcttaaagctaagcacagttgagatacct

SEQ ID NO: 40188 - DNA, 458 bp, Oryza sativa
  Clone ID: uC-osroM202025d10a1
gtatcctccaattagttgccccccttttttttttttgaggtagaatttatcaatttatgtggataaaaagctttatacattatagacttgtatacaattacactgccactgtaatatctgaacaagaaaacatagccaggtttaccctggctccctggatctcaatgctgtcctcaaaggattggccggttgaattgttgtacagggtgaaaaagacccacatatccgagccaagctgcgtaaccgcaacggagactgccacctttttacggggactcgtccctgcagtgtggaatattacacaaacttttccctcgaaaagcagctcaatgtccctacatgttggctaaagccaacaagctgatgggcacgagatccaaaagtctagcaatctaacctaagtggccagaatctgaagattcacaaagcaacacacgatgtccaagcttttttctatc

SEQ ID NO: 40189 - DNA, 438 bp, Oryza sativa
  Clone ID: uC-osroM202025d11a1
tttttttgtttttttaaaattttttttttttttatttttttttttttttttttttttttttttaaaaaaaaaataaattattaaaaaaaaaaaaaaaaaaaaaatactaaaaaaaaaaaaaaaaaaaaaaaaaaaaaaacaaaaaaaaaaaaaaaaaaaaaaaacccccgcaacaaaaaaaaaaaaaatcctaaacaaaaaaaaaaaaacaaccaaaaaacaagacaacccccccactggggaaaaaaaaaaaaacaaccaaaaaaacccacataacaaaccaacacacaacccccccacaaacaaaaaaaataacactcacgcccaagaaaaacaaaccccaaaatcaaaatttccacccaaaccaacaaaatgaaaaacccccccccaaaaaaaaaaacaaaaaaacaacacaacatcaacacacaaacggatccc

SEQ ID NO: 40190 - DNA, 499 bp, Oryza sativa
  Clone ID: uC-osroM202025d11b1
gtttgattttttttattgaaagaggcgggatatcacagcttctctcaaagtcttcaggcacttatcgttccagaagacacttgcgtgtgccgttgtttggtgcgaacataagatcatataaagtatagtcaaggctgataagctgacacagctaccagcagtgcactacactcgtagcttattaccagccccagcagtccccgagattagcaaaggttgcagatggcaagcacagcttgcgaaaggacttgctcggccaatagttttgatgcaaagcctgctgagcctgcggctggtgtgcgcaagctgaggcctattgtccagcgtaaagcaaggtatgactcggcagagtacaacctgctccaagaaggcaagcagcccaaggatgggattgtgctggttagcctccagatgacagcaattcctcttaaggcccgcttgacagaacctacatcaaacttggcaactggcaacaggcctagccggctttccaggagtt

SEQ ID NO: 40191 - DNA, 493 bp, Oryza sativa
  Clone ID: uC-osroM202025d12a1
gaggaacaaaacttgattcagcagaaagccaatccttgctagagtaaatgtcagacgatgatacttgaatacattgatatggtctgcttaaataagctcctaataacattgaaatattgaggcacagtagaccaacaactatagtatccagtaggtagcaagcaatttagaaaagagatgttcccttgcccttcttgtctccaccaatctcgaaatgcttgcacctcttgatggggtgctgggagtaatgcttgcagctttggcattgcagcttcagcacgatcttcttggtggtttttgccttcttgtggaaaacaggcttggtctgaccaccatatcctgactgctttcggtcataacggcgctttccctgggcagacaggctgtccttacccttcttgtactgagtgaccttgcgaagggtgtgattcctgcactccttgttcttgcagtaggtcttcttggtcttgggaacgttcaccatgagaaagac

SEQ ID NO: 40192 - DNA, 476 bp, Oryza sativa
  unsure (1)..(476): unsure at all n locations
  Clone ID: uC-osroM202025e01a1
atgaaatagtccatctgatagggggacataaatatatgtacatctacaaataggagtgtaaaaagttaagaactactacaatgatattcctgtaattaaggtttgtaacaaacctcattaagtaacaaacattactattctgacagcaaatgacatggatccttttgatcttgtccaaaattgtttttacttgcatcgcattacactttcaaaagtgcacttgactctttgacatgtaaatctctatcctagactgaaaagcaaacaaggaagagttacacacaataatgtaaatatgaccagagcaacttcagtgtgtacttcttctcgagcgacctgagtgcaggcacaccatcaacgcgacacgcgcactgttgcggagccctgaagccatttgtattcccctttaatctctctttattttcgngaacattgcagctagatttctgctctgagtgaatgatgtgcataccggg

SEQ ID NO: 40193 - DNA, 386 bp, Oryza sativa
  Clone ID: uC-osroM202025e02a1
gtaaaaatctaatcgatttgcttatgccaatatacaccaacaacaaatggaatgcacgttagctctctctctctctctcagtccaacccaactcgactcaaggcaagtccatacgccatatccttcttcatctctggtgatccaaaaattgaaaaaaaaacatggaggtcatcatcacctgtaatctaatagaccatgtcgtcgcggacaacgctggcgaggggagggtgggcgtaggggcccctgatccaggtgttggcgatgaagcggtagggcgcctcggcgagggggatgcccgcccagctgacctgaggcgtcggaatcctcgcacgtttgtggggccgggaggcccgcccaccgcactcatgttgtagttgtccggcccg

SEQ ID NO: 40194 - DNA, 429 bp, Oryza sativa
  Clone ID: uC-osroM202025e03b1
cctgatcacctcactttatttgtgcattacattacattatccaacacacacacacacacataccccaatcttttatcatatcatttccatctttatttgggcatgcacgtcacatgacattacttactttatttgtgcacgtactagtagtagctcgtgcatgaatccagtgaagtgatcagtgatcaaagtgaaaatggatcaaggtttggttaattaccagccgtccatcacagaacctgatccaggagaccaggctcattaccagccgtccatccggtcttcttgtcccagtacctgttccagaccatgatgcccccatagttgggcagcttgctgatgaactgcaacaacgtgttattagagatccttgtgcgacacttaaccgtccctgtcagactccggcgacgcgacgacccccacgaggac

SEQ ID NO: 40195 - DNA, 234 bp, Oryza sativa
  Clone ID: uC-osroM202025e04a1
ggggggtacaatcaaataaatgggggagaaatattcacttacattgaacctagggaaacgatccagtctcccgtggcaatacaacacgaccatcaaatacagggtcaaaagcaacgaactatggtgatcggcctccatacaaacttattgttaacctaaagtatactcacccttatgattacttgagttatcataattcacggattctacttcgagcatttctgcatttaaccc

SEQ ID NO: 40196 - DNA, 438 bp, Oryza sativa
  Clone ID: uC-osroM202025e05a1
aatgtcgccctttattttttttttttttgttgtttttaaaaatttttgtgttttaaatttttattttttttttttttttattttttttttatttttttttttttattttttttttaataacaaataaatttattttaataaaattgatttttttatttttataaaaaaaaaaaaaataaaccactaaaatctcttaaaaaaaaaaacccaaaaaaaaaaataataacatcttttctctaaaaaaaaaaaaattttaattagaaaataaaaaatgtctaattctcttaacccaaaaaaaaaaaaaccgaaaaaaaaaagaaggggtacctaaatcttttaaccaaacataaaaaaggtccctaaaccgccaaaattaaaaaaaaaaacccccccctttttttttttaaaaaaccccaaatttttttaaaaatttaaaaa

SEQ ID NO: 40197 - DNA, 451 bp, Oryza sativa
  Clone ID: uC-osroM202025e06a1
aaaaaaaaaccacaacctttcaaaaataattataacttttaatacaaggaacccagcttacattcttacccaaacatcacaaaggcaaaccaggccttattttttttcttgcaaaaaagcacagatgcctgcaaaaaccatatcactgccccccccataaaacaaatactaattaatccttctacaaactcctccaatcatctccatgaccccctgaatgcacccacccaccgggccagtgtgggggcgcgaccgctaaaaaactgacactgctccttctgatgtggccgccatggtggtagccctcctcgccaagcttaatttccttattattcttcctgccctttttttccttgaaatccccgcccaccccttggacaccggtgaacttgtccttgatcttctccaccacgccttccttgtgctcccctcccttcttgtggagctcccc

SEQ ID NO: 40198 - DNA, 483 bp, Oryza sativa
  unsure (1)..(483): unsure at all n locations
  Clone ID: uC-osroM202025e07a1
ttttattggaagtttttaattttgattagggggtacataaatattatgtacatttacaaataggagtgtaaaaagttaagaactactacaatgatattcctgtaattaaggtttgtaacaaacctcattaagtaacaaacattactattctgacagcaaatgacatggatccttttgatcttgtccaaaattgtttttacttgcatcgcattacactttcaaaagtgcacttgactctttgacatgtaaatctctatcctagactgaaaagcaaacaaggaagagttacacacaataatgtaaatatgaccagagcaacttcagtgtgtacttcttctcgagcgacctgagtgcaggcacaccatcaacgcgacacgcgcactgttgcggagccctgaagccatttgtattcccctttaatctctctttattttcgngaacattgcagctagatttctgctctgagtgaatgatgtgcatacc

SEQ ID NO: 40199 - DNA, 423 bp, Oryza sativa
  Clone ID: uC-osroM202025e07b1
aaggtgaaccatcaatcaaattccagatttccagtacaaataaaagctgtctccactacacaacacacgaccacacaacccccggcaaccgatgccgggccggtaggctaaaataaactgcccgcttccgaaccacacgaaagcgccatcgacgacgatctactgggctactcccctgctggtgtacgatcgatcgcgagagatatatacgaactgtacctataggtcggtaaaatcaaggaccaccaccaacaaaaacgcttaattcggttgcccaaccaatgcacgccgcagcgccggacgcgcgcgaggatccctacctagacgccaccgccgcggccgctgccgctgcgacatccaaatcgtctgctagtacagtacacggaatgcatatatatgcgtacgtgcgatgaactgagtagg

SEQ ID NO: 40200 - DNA, 172 bp, Oryza sativa
  Clone ID: uC-osroM202025e08a1
gcgggctcatcaagcatttggtttaggcacggtccacaattaatacatggatagtgggtacgtctcgttggcagacactaacggaacagaaggggagttgtgggtacagcgttagccatatctttgtgcgtctttggaggcccaaagttggaaaaaaaaacagggagggggt

SEQ ID NO: 40201 - DNA, 484 bp, Oryza sativa
  Clone ID: uC-osroM202025e08b1
gtttcatggcaaggggtttcagtctttcatcgatgaaaaggtagttccattggctgcagacatgatgcatcagaacctgggcctcgaggaatccaccttgcaagagctcgccaaggaccttaacatcatcgtcaatggagctgccaccaccaacttctacgaaaggtacgacgtggctctggatgtgaacgtgatgggggtgaagtacctgtgccagcttgccaagaagtgtgccaatctcgaggtgttcctccatgtctccacagcgtacgtgtgtggcgagaggtccggggtggtgcaggagagggcgttgagggagggggagacgctgcgggaggggacgtacctggacatcgagaccgagctgcggctggtgggcgagcagaggcagcagctggaggacgccggcgactccaaggcggagaggaaggcgatgaacgatctgggtttagccagggcgcgccactttgggtggccaacacct

SEQ ID NO: 40202 - DNA, 332 bp, Oryza sativa
  Clone ID: uC-osroM202025e09a1
ttttattgggggttttttcacttcgcgggggaccgaacaaccaatcataaaaacaaaaatattgcatcactcccacaaaattagctctggaaacttttccccctattgagatcactttcttttgttattacttattcatgatcttgcaactcagattatgagtaattgctagtgtaaaattttttcacgaagtcttaagacccttggtctttctccatatcctgcaccagtccctttttgccgaccacatattgtccaatgacgtgattgccctgcttcgcgtgttcggtgatgttgcccagctccttcatccccttaaacaggagcatatc

SEQ ID NO: 40203 - DNA, 317 bp, Oryza sativa
  Clone ID: uC-osroM202025e10a1
gggggggcaatcaaatcgaaggggtcgattcccttcttttgcatttgcacatctgcagctaatagtacaaactgaataatactaagtaagaaaacagaaccccagagggctcgtaaactgaactacagaacattgctactacatatctgctgcttccactaagctcccctcgattcagctcacgggtaacactttctcatcgcatctccatttctccatccaagctgctacccacaagtgtacatctgttctccaatctgatgaaactcacactgaccattcttgtgcagcattagaatttaaaacaccccgccttt

SEQ ID NO: 40204 - DNA, 314 bp, Oryza sativa
  Clone ID: uC-osroM202025e11a1
acacaaaaaaaaagccaaaaaaaaaccaaccccttttttaaattttaaaagggaaaaaaaaaaaataaacccctttttattgcccccccccccacttaaaatttttccccccttcccaaaaagatttttaatttttccaattgccaattgaaaataaaatatcccgttgggcgaaaaaaaacttaaaccacaaaaaaaaaatactgctcactaaaaaaaataaacggagggcccaaaagggccccaaaaaaaaaaaataaaaaaaaaatccccccccccttttttgtttaaaaaaccccacaaacttttttaaa

SEQ ID NO: 40205 - DNA, 450 bp, Oryza sativa
  Clone ID: uC-osroM202025e11b1
ttcttgcattgttctttctttcgttccataagtcgttgcatcaatattagcctgattttgagctatcaaagtagcaaaacgatggcaagtgctagctcaccggaaggtgcaagttcgagctctcctgaaaaggtcaagatggtcaccgtcctgagcatcgacggcggcggcgtcagagggatcatcccggccaccatcctcgccttccttgagaaagagctccaaaaactggatggtccggatgctaggatcgctgactacttcgacgtcgtcgccggcacgagcaccggtggcctcctgacggcgatgctcactgctccaaacgagaacaaccggccactgttcgccgccgacgaattggccaaattctacatcgaacactcgcccagcattcttcccacaaaagaactgggtcttggtcaaaatcgccggcacgctgaggatggtgag

SEQ ID NO: 40206 - DNA, 453 bp, Oryza sativa
  Clone ID: uC-osroM202025e12a1
aatacacatcaatttcatcataattagcgttcttattacaaggcaccgtgcagccattattatcagtacatcacaaaggcaaaccatgccttttttttttcttgcaatcaagcacagatacatgcatgagacagatcactgcatcacgtattgcacagatactaattaatcctgctacgaactcctccaatcatttgcagcatcacctgcatgcacccacgcacggcgccggtgtgggggcgcggcggctcaaccgctgtccctgctgctgctgctgtggccctcgtggtggtggccctcctcgccgggcttcttctccttcttcttcttcttggccttcttctccttgggctcgccgccgtcgccgtggccgccggtgatcttgtccttgatcttctccaccacgccttccttgtgctccccgtccttcttgtggtgctccccctccttctt

SEQ ID NO: 40207 - DNA, 383 bp, Oryza sativa
  Clone ID: uC-osroM202025f01a1
ggtgggttattatttaagccaaccaacgaacgaacggggaccctaacataatgcaggacaaaagggtaacgcaatacccaaaaatggaactatttgaacaagaggggttcactagaacagattgaagggagaagacgcatcgcacacctgggaaaggaacatatgaggaccccttgcctacaaagggccagcaaccccaagggtggggacggtgctcatcaaggaaaaccaccttttgcaagaaaaacgagaggatgccaaaaagaacagactcttacagcaaggtcccaccccgaaaactgagctgttgagcaaaaaaagcccaggatattggctaacatccactcttccgcagttggcccgccaacccctattgctgtggc

SEQ ID NO: 40208 - DNA, 358 bp, Oryza sativa
  Clone ID: uC-osroM202025f01b1
cttcttctctcgacttctccttcgagttgttagctccctccttattcaaccatgggtaaggagaagacgcacatcaacattgtggtcattggccacgtcgactccggcaagtcgaccaccacgggccatctgatctacaagcttggaggtatcgacaagcgtgtgatcgagaggttcgagaaggaagccgctgagatgaacaagaggtccttcaagtacgcgtgggtgctcgacaagctcaaggccgagcgtgagagaggtatcatcattgatatcgccctgtggaagttcgagaccaccaagtactactgcacggtcatcgatgcccctggtcaccgtgacttcattaagaacatga

SEQ ID NO: 40209 - DNA, 496 bp, Oryza sativa
  Clone ID: uC-osroM202025f02a1
gcgaacggcgccatcttgggggggtccatgaactgcgggagcttcagccccttcatctgcagctgctgctgcagctgctgaagctgctgcggcgtcggctgcggcatctgcggcggcatcatcatcttcacgtctttgctgccgcctccaccgttgccgccgccaccgccgccgcccttctggcccttgccgccggcgtccttgggatgccccttgccgccgccatccttgggctggcccttgccgccgccgccgccgtcaaggtggagcttctgaaactggttgttcaccgccgccaccccgaccttggaaccccatagctccgccggcttgccggccttgttgagcttcttgataatggcggccggatccaccaggccagacaccgtcaccttcccctgctcagcgtcaatgctagtctggtacacaccttcgatcttgtggaggatcttcttgaccttcttctggcacccatcacagtggatgttcactttca

SEQ ID NO: 40210 - DNA, 424 bp, Oryza sativa
  Clone ID: uC-osroM202025f02b1
tcggttttcttgttcagaacagatcaaataaagaaaacaaccatacccaaaatggatatgtaaatggttctaacagtgaaacatctgctggcatggatggcgacttgtacaagaagctgtaggatggtctgagtaacattggatattgtaaagctgaactttcagatgaactgtataccaaatacaggcacatttggtacccagtcaaggataatgatgagcgtagtgctgacatgcgagatctgatgacttctttctaagcacttgaggagaaagtttctggaacagtatacatttgctaagtagaacttgatcagaaatgctgcacgaaacttatctgttggataatgggattaactggggagcagcacccactataaagggcatttgaaatgcaatttttgatttaatgaacatttcttta

SEQ ID NO: 40211 - DNA, 358 bp, Oryza sativa
  Clone ID: uC-osroM202025f03a1
ggagaaaaaaaaggggttttttttttttaaaagggggcatataatattttgaaaaaaaacccggggggaaaaggtaaaaaaggggtaatattgaaaaaaaatttaaaaaggggggaaaaaaaatttataaaaaaaaacaaattgccaaaaaaaaaaaaggaactgggaaaaaaaagggggggttccaaaaaaaggggaaaaaaccttggtcaaaaaaataaaaatttttttgcaaaaaaaaaaaaaaaaactccccgttgaagtggggaaaaatggggaaaaaaacctaattcaaaaggacttcggggccccggttccttatttttaaaaaaaaaacttttgaaaaaagggggggcct

SEQ ID NO: 40212 - DNA, 530 bp, Oryza sativa
  Clone ID: uC-osroM202025f03b1
tctagatcgcgagcggtcgttcttttttttttttttttgtgcaagaaaaattatctgcaaaacactgattctaaataacttaaatgtatatatacatatagttcatctaactaaaatagtaaaatggagacatagggtaaaatacataccatgactacatcggacacatacaccatgcttaaccttgcaaatgctgcacaccaatttccactgattcttctggacacttccaacattagtaacaggttccattgattccatgtcttccacaagagctcccggtgtccaaaggctacaaaacaagtgcacaaatttaaggttccccccatgcgctgtttgaccaggctcccctttgacaggttttagagcgcctttcttttttgggcatagaacacaaggcatcgacaaggtgttgtccgcatctttctttaacgactgcagtgacttcaaatccttacaccaagtgcacaaccactggtcattaagcacaacatgccaaccataacacttctggggcacaattaccttac

SEQ ID NO: 40213 - DNA, 449 bp, Oryza sativa
  Clone ID: uC-osroM202025f04a1
aaattccggggggaaaaaaccaaacaaaatacccacagaaatacttacagcaagatttaaacaaaaggcagtggtaggtgagacatgtgaaacatttggctatcaggcaaatgccaataagttataagcaactacaaagtcttatcacaatgaaaaattggaaaaaagccacgggaggcatcaagctgttaacctaaaattctccctactgccaacaaacattgtttagaaagacttctaccccctgggatcacaaaaaaacaaccctgaaacactttacgggcaactaaaaaggggactaactttcggcaacaaacattgaggacagttccataatttaccataagaaccaactcttaacaggatgaagaaaacccacacagcatgagctcctggaagaatcaaatgagggcacgccaagtaggggacagaccctttgggcctctcca

SEQ ID NO: 40214 - DNA, 436 bp, Oryza sativa
  Clone ID: uC-osroM202025f05a1
ggtgggaaattagtgcacaggggggtctcatcgaaataggaattcttatacagctatcttttgacgctacacggaagttcgacgctgggaaagtttgactacaaatggactcaacatatgacaacacaacatagcaagttttaacaaacttggcgcattccagcaagtaggatctctcagccatggttgaaggactggtaaaccggaacctgagaaatcatatgcccaagattgtcatagcaatgggggtatatcattgctggagttggccactgtgggtagacagcagttccagaagaggagcccatagataaatcgggttggccaaagtacacagaagggttggtttcttgacatattagcagactgcataaaaccaacaccatactgcataaactgtggcccaacaaaattgaagccaccaggactcacattg

SEQ ID NO: 40215 - DNA, 457 bp, Oryza sativa
  Clone ID: uC-osroM202025f05b1
gaaaacaataccagtagtagcttttagcctttaaagctatcccggtgatttatacatttcagccaaatatttcacaataaacaaattatcgctaaatccatcgggttacggctgagatccttgagacttatctctatctacaattaattaacctgggtgtcaagaaaagcttacatatatttcgtgctcatggcataaagctgacctccaaatgtcatatgttatccatatcaagtggacagcataaacaacgctgtaatatagaacttacgaggcgttgaaatgagcaaaactgaccagctgctgggagaccttgagagaaaaagaatcttttaccattagcagagaagtggtggccaataatttcagtatttttaggaggaacacacaaccattgtttaagttaacgacgcccaaactattactaaacatttcattttatcaacaattaaagtga

SEQ ID NO: 40216 - DNA, 440 bp, Oryza sativa
  Clone ID: uC-osroM202025f06a1
aaatccttggggtttttaaaaaaaaactttttcctttcaaaaaggattttaacttttcattttcaaagcccactttaacttccacccaatcttcattaccagaagggaatctacaaccacttcagttttaacatacttaggcccccccaaacaccggaccccccatcccacaaaaaaaaacgcggcgcccccccccccgggaccctcggtaagcccccattaaccccccacagggcccacaaacccgcaaatctcttctcctggaaccccaaagccacctcaagacccctcgtccccttcttttatcccccaatgccaaaacccccccttaagtgtccctttttttcggcacaccacaccacatttttttttttaaaaaaaaaaaccccaaacccgtggccccccacctttataaaccaaaagaaaaccccttcttaaaa

SEQ ID NO: 40217 - DNA, 508 bp, Oryza sativa
  Clone ID: uC-osroM202025f06b1
ggctctacaaggtttgcccttgagaatcaagctattaatgaagctaccttccgttgccctgatgagctgggatggaaaccacagagggcccctattgtgtcatctgatggaagcatctcaaatttaagaaagaccactgtgcctgtgaatgaagtgaacaagtccctacaacagatgggcttcgatgtggcgccttcggatgacgctggtcgattcgtatgcaactatgtctattaccaatctcttaggttcgcagaacagcgcggtatcaagtctttgttcgtccatttccccctcttcacgacgattagtgaggaagttcagatgaacttcgtcgcaaccctcctcgaagttcttgcttcccagaactatgcacagtaacctgatggggggcagggtctacttcctaaggtttcttcttcaattttattaggaagttgccaagtgacaaaacctctctagtgctctgtttgctgtccgactgtaggccgtcgtcgcttttgctgtg

SEQ ID NO: 40218 - DNA, 395 bp, Oryza sativa
  unsure (1)..(395): unsure at all n locations
  Clone ID: uC-osroM202025f08a1
gaatcaaaacaggtgtattaccacaactttttaaggatggaattgagtagcaatactttcaccccaaaatacagtttagcgacaatatcttagaaaagccgcttgctttgccgccatggctggcaagctgagcagagcagctaacacaaagaacacgagatcactataaaccaaacggcaacgaacgaagaaaatacagggtcttttttgtctgaagatacacgaagcggttcgttttcttttatttttagtctcctctcctcctccatgatgggtgtatggcaatggcaanggccacgggatcttggcttacctgatgggaaggggctcgccgtttcactccttgaggcaccccagcatggggccnatgagcttgccctgcctgatgcccagga

SEQ ID NO: 40219 - DNA, 464 bp, Oryza sativa
  Clone ID: uC-osroM202025f09a1
aatccaataatcgggaggtttttttaaaaggactcatctcaacatccataacaagcaaacgatagttgtttccgacaccaacattagaccataacgagtcaactgacaaccatagactagaccaaaaataccgcggactgcatagataaaacatcagtgtcgagcagaaggaaccgctcagcacttgacctccttcagcccatgagagaagtaaaggaaggttgggtcggtggctccgtccttgtagtaggcaaacaccaagccgccatcatcatgcatgctctcaccaacaaagaactgaaggtccttgagctttccaagcaagtacttggtggcaccctcaatgttcttcttgaattcctcttgcttttccgcatccagcttggcggagaggttcttgatgtagcgcttcatgaaggccacacactgcttcttgtcaaaaggaggttgctcctgaagacgga

SEQ ID NO: 40220 - DNA, 409 bp, Oryza sativa
  Clone ID: uC-osroM202025f10a1
ggggggaaaaatggagattttattccacaactcgttatttgcacaattacatcttaaccatgggggatacaaacgaaacaccaactaatttgcaatattggccgagttcacatactaatatgtacaatattcttccatggcgagatagctgagccccttgataaataaactttcacctcaacaccaaatattcctatgttttgctaactgactcggtagctcctgacaatggccgatgatcctccaacgatgtttgtgctgaaggaagactagaaaggctcattctggcaggccctttatcctgaagatcttctgtctctttaccatctgaaatacctgatgttctcatgcccctagaaggtatcgaaaaactgcgggatataggcccaggtggtgtccgtaaaggtga

SEQ ID NO: 40221 - DNA, 211 bp, Oryza sativa
  Clone ID: uC-osroM202025f11a1
ctacataagctagcctcctcaatagttgcccccctttttttttttttttggtggttttttaaacacaggggggtctcaacaaaatatttttccctattcattttttttttttactctacacttgaacatttgacgctttttaaattttttaccaccttttgtctcaaaaaaggacaacccaccattggatgttttaaacaaacttggccca

SEQ ID NO: 40222 - DNA, 313 bp, Oryza sativa
  Clone ID: uC-osroM202025f12a1
ggagttacataaaatatatggggaatgaaaccctcattacaatataacgccccacatacaaacacacaaactaatcacaccaaaaaaaaaaacatacgcacaaacaaaccacacacaaaaaaaaaaagaagcacacgcgcaaacaaaccgcacacaaacaaatgtcccaaaaaaaaagcacacgcacaaacaaaccaaaaaaaaaaagggacacgcgcaaacaaaccactcacaaacaaatgttaaaaaaaaagaaaagaaaaaaaagcccacgctcactttgaagccggtacacacatggcagtggtgacaa

SEQ ID NO: 40223 - DNA, 369 bp, Oryza sativa
  unsure (1)..(369): unsure at all n locations
  Clone ID: uC-osroM202025g01a1
ggttggttctcacacccattttctttttttttttttaccttttcccaaaaaaaaaaaaancccttcccttaatcaatcccacaacaaattcaaccccccaccctcctctnccccaattttgccaaaaacccaccccgtccccaaaaaaataaattcctccaaattcccccctttttttaccctggcccacaccccaaaccccccaagttgttggaaaattccccaaaacaatttccccccctttttaaaaaaacacccccaaaacaacaaaaaaaggccccccccccttttccctttttccccccccacactatacacaccgccggtgtgacaaacaccccccccccccaaaaaaatctcttttccttt

SEQ ID NO: 40224 - DNA, 400 bp, Oryza sativa
  unsure (1)..(400): unsure at all n locations
  Clone ID: uC-osroM202025g02a1
gggagggggaaacataattttccattgaagtgaaataagaaggaaaagaataaactgagggcgattacatcatgtctacttatgaaacagggataacaagaattttttttctcaaacacaggaaataccatttaggaaagttacctaattgccacgacttgtcagtcacacgagataatcacaaggcagaaaggggaaaatgaaacaaacggatcgctcattgcctcgacaaagaggccttgctggagctgccagtaaactaggatccccggaccatgaatgctgtttcgcttaagcaagacccaacaataataaagcctggcaacttaattggtctttttcttgggcgnctactgatgattagaacacaaaatggagcacgcccccctttgcgcctttt

SEQ ID NO: 40225 - DNA, 410 bp, Oryza sativa
  Clone ID: uC-osroM202025g03a1
acagaaggtgtcattaatatgattgtacatgaaaaagtatattatgattagaatattttcacccattataatgcacgggtattttttcagtataatataaatataaaagcaagaagaggaaataataataaagggagcagtgcaggaggtagctagtagcttggtgcggtgccgagcgcgtagctcttgagaaggtcaccgcagatggggagtgggcgggtcttgaggaagccgagaggattggcgcggcggaccatggtggcgaggccggcgtcctgaacgagggtgaccggcgcgcggtctcgacccacctgcagctcgtggcattcagggaccgggctgatgtatagtgccatcagacagacctgattggcacctatgttgagcaccagctcgatgcggtagtgccc

SEQ ID NO: 40226 - DNA, 387 bp, Oryza sativa
  Clone ID: uC-osroM202025g04a1
agggaaaagggttaaataaccaagggggccccccaaaaattccccttaaaagattgcctggaattaaaacccgtgttccaatttaccctaccccggatttggtttccggaatccccaaaaactccctcccgtgaccgggtttaatttttaaaaagccccgggtccaattattgcgacaaaagtttttgatccccccaaaaatggacccttgatagcccaaccccccttaaaacccttaatatgcctaccgggggtggcccatcggatctttagcccccccccgagggagaaccccccctgtaggccctgaccggaaggccctcaaagggacccttgccgagcacaggattaccctgggattgacccagggtagccccaaagttggcc

SEQ ID NO: 40227 - DNA, 408 bp, Oryza sativa
  Clone ID: uC-osroM202025g05a1
atccaaaattcttttcttttttcaatttttttttttatcaatctaccatacgttgcatggggttcttactagcacaaattgagtgaaataatccaggctagtctgacatgtacagcaacaacattacagggcaaattattatttaccattcaccaaaatacacagtaaatttgaatatttccgggcaaaacgagcattagggcggcaggaaacttgaaaaaagcagcaacccaaccacttactactgactgagcctagcattgtccatacatcaatgtattccaagaaagttggctcgaattatatgctcactgatccaacagtttcaacaaaccacccaaagaaagaactttggaaaaaggttggttcctactccctcccttcatgacaaaaaaaattccattattt

SEQ ID NO: 40228 - DNA, 316 bp, Oryza sativa
  Clone ID: uC-osroM202025g06a1
ccctccttcatcatgtatcctccacagtagtcgccctcctttttttttttttttgggggattctaaaaccatggggggaaacccatcaacacctaatccaatttttctattttctcaacaacaactcacacaacataaggactctaaaactcaacataacacaacccaaaaacacctgatatgactgaccacaaaaacatccaatcaccattaacacattttaaccaccagacacccacataaaccaccacggactttttttacaggaaacccacagtacattcttgttgacttcttacacaaagaaaaaacccac

SEQ ID NO: 40229 - DNA, 372 bp, Oryza sativa
  Clone ID: uC-osroM202025g07a1
gttatgagaaaaaaaaagacaggtccattttgttaaaacaccaattgtttacaagaaaaacaatgttttggaactttttaaaatactttgaaaaaggggtaaaaggggatccctttaatcgtaccccggaagttaacatgggcaaacaagaaaatctttttggaattaaaaaggggggctattttcttaaactttaaatggttaaaattctatgggacaaacctctttgaacctttttcccgttaaaaaccccggggagttttgcaaaaagccacaacccccccctttaaaaaccttttttgaaaaaaaggggggggaggaaaaaaaaaactattttttaagggggatttttgttaaaaaccctttaccctt

SEQ ID NO: 40230 - DNA, 553 bp, Oryza sativa
  Clone ID: uC-osroM202025g07b1
ggtccatcgtgcccattattagcaagatggacaggacctcgatccttggtgacaccatcgactacgtgaaggagctgacggagaggatcaaaaccctcgaggaggagatcggcgtcacgccggaggagctcgacctgttgaacacgatgaaggattcctccagcggcaacaacaacgagatgctcgtgaggaattccaccaagttcgatgtcgagaaccggggcagcgggaacacgaggatcgagatatgctgcccggcgaaccccggcgtgctgctgtcgacggtgagcgcgctggaggtgctggggctagagatcgagcagtgcgtcgtgagctgcttcagtgactatggcatgcaggcctcctgcttacaagaggacgggaagaggcaagttgtcagcaccgacgagatcaagcagacattgttcaagagcgcacgctatggcggaaggtgtctgtagctagctagctatacaatccattggacgcttagcactgggagcaggtacagggtgcataaatatgatcttcatcatccatgaataagaagtat

SEQ ID NO: 40231 - DNA, 474 bp, Oryza sativa
  Clone ID: uC-osroM202025g08a1
gtgagctcggcaatctatggatggttaaataaatagtctttaacaacaaattctagaatttaaaagttctgcttgagttcatcgaaccaccaaaacaagtagaactggtcaactaacaaacggtcagggatgtaaatgaactagggcgtacatacactccacattcttgaacctccacgactagggtctaaaaaatcatcgatatactcaagcatccatcatatgagctttctgtatgcattcagcaattgagcatgccttcacgggctatcaccaatcccattttgctgcatacagaaaagcttatctcctgagaagtacctcaaatcaaagcagaaagctgatctattctcccatcagattgcagggatttccaactattctcagcggtagccccatcctcttccccggcctcccctgccccggcctcttccactgcctgtaccaccacgggataacccttcaaaagctctg

SEQ ID NO: 40232 - DNA, 503 bp, Oryza sativa
  Clone ID: uC-osroM202025g08b1
tttttcctccttactcgcagctacatcagtgggtaccaggcttcaaaggatgacatgactgttttcacctcacttccttctgctcccgcagcaagctatgtcaatgtcacaaggtggtatgatcacatcagtgctctcctaagatccagtggagttaccgcagagggtgaaggtgtgaaggttgagtcaactgcttgttctgtgtctccaactgctgaccaaaaggcaccagcagctgatgaagaagatgatgacgatgttgatctgtttggtgaggagactgaagaggagaagaaagcagcagaagaacgggccgcagctgtcaaggcttctggaaagaagaaagaatctgggaaatcatcggttctgctagatgtaaagccatgggatgacgaaacagacatggcaaagcttgaggaagctgtgagaatgtgaagatggagggcctgctctggggtgcatccaaacttgtccagttggtatggcataaaaaattgcaaatt

SEQ ID NO: 40233 - DNA, 458 bp, Oryza sativa
  Clone ID: uC-osroM202025g09a1
ggggggtatattaaagatggtggggctttctttataactttatacagtgacacaatggttttccgtttatacatacatacatacataattacatcactaagtagactataaacaatcccaattcaagccacacacacaacacaaattcttcattcttcacacgcaccgtgtgatcgggccacgaggctcacatgacggggtagctcggcagcagcgcgatgccgcacagcccggacgccaagccggcgacgtcgcgctgcatgaggatgtagccggcgtcgccccactccgccccccacgagttcttcacgatccagtacttctcgccgcctttcgccgcgccgccgccgtccgtcttcggctcggactcgccgtagcccaccacggtgacgccgtggttgacgtcggcggtgcacggccccgtgtagaccccgctgccgtagagctggaacatgaag

SEQ ID NO: 40234 - DNA, 472 bp, Oryza sativa
  Clone ID: uC-osroM202025g10a1
aaatattcgggggccactttatttggcacactggtgttcgtaaggttcgggtgaagtgaaaacaaaacagtgagcagaaccaaaatcgtcactgcttagctccgagctgaacgcggctgggctaacgaaggaactgacaagctgacgaagtgaacgccgatagcccgcgaggaccaaattctcatcggcccctatcatggctcgcacgagcatcccctgccggacgacacggctcggaaactccgatcccactggtccacaggcgcagcttcagcgtgagggacatggcgcgggtgcttgtccctcttatcaccctttatctgcttcagggcgtgtttcagtgctggaagaagcgcctccatgcactccgcaacagcgttcggtttcccggccatgctgatgataagtgttgatcccctgatccccgcagtggctctagatagcattgcgaatggtgtcacctttaaacttt

SEQ ID NO: 40235 - DNA, 490 bp, Oryza sativa
  Clone ID: uC-osroM202025g10b1
ttcctcaatccccaatccaaccaataactttaattccttctccgattcgccctcgaccaagaaccactcggatcgagcaaaggcgacacctttgcaccaaatccccaatctttttttaacttcttattttcttgcaattgatgcgctacgccatcgggatttgaggggaggaagaagaaggggatggcgtgcagggggttgttagagtgggtcctgaagctgctcaacttggtggtgatggtggtcgggctggccatgatggggtacggtgcctacctcctcgtggcgtggctccagctgctgccttcgccgccgccgctgccgcctgcgccggcggtggctcccggcggcggcggaggcggcgagatggtgcggctcgggaggccgctgcttgttctcctcgacgtgtcgtacttgcccgatgggacggcggagaggctcttcgctgcatggtttatatacgcgtttattggtgttgttggaatactct

SEQ ID NO: 40236 - DNA, 451 bp, Oryza sativa
  Clone ID: uC-osroM202025g11a1
agaagcatggactcagcacaatctttttattatcaatctaccatacgtagcaaggggttctcactagcacaaattgagtgaaataatccaggctagtctgacatgtacagcaacaacattacagggcaaattatgatttaccattcaccaaaatacacagtaaatctgaatatctccgggcaagacgagcatcagggcggcaggaaacttgaagaaagcagcaacccaaccactgactactgactgagcctagcattgtccatacatcagtgtattcgaagatagttggctcgaattataggctcactgatccaacagttccaacaaaccacccaaagaaggaactttggagaaagggtgtttcctactccctccctccatgacagagaagttgccattatttgccttgaagcatcgttggctggccgtatcacaaaccgggtagtcatga

SEQ ID NO: 40237 - DNA, 417 bp, Oryza sativa
  Clone ID: uC-osroM202025g11b1
aacgtttttcaaccgctctaaaccaaaccatggtgcgccacagtgaccggctaggcgacgtcgcggtgttactcctgctcctgataaactcctgcgccaaactgggtccatcgtagccagaggaagatgagcaccgctgcattgagcagggtgtctgtctagcgtgaggagggggaaccacagcttgacggagcggggtacttaacgggcgtggagggggctgacagcgggaacaaccaggacgagaataagcaggcgtaccgtaaggacgacaacaccgtcaaccttcgacaccaaaaggggtctcgcaggtctgtacagcaacgcgatgcaggacgaaactaaataaggtgggcccagcctgggtaaacgacgcgaccgttaacttggactacggggaccaatgaatggaaggac

SEQ ID NO: 40238 - DNA, 341 bp, Oryza sativa
  Clone ID: uC-osroM202025g12a1
ggggacccccaaaaaaaaaaaaaccggggtttaaaaaaaaaaaatttcccggaaaaaaaaaagctcaaaaataaaaagggtttttaaaattttaaaaattaaaaaagggggcaaatatacaagggcaacttttttaaaaaaaggtttagggggaaaaggaaccctttttaaaaacgggaaaaaaattgggttttaaaggaaaccctttgaacaaaataaaagggaaaaaaaatagggggggcgtttcccccccaactaaaaaaaaatggacctttgaaaccaaaaaggggtttggaatccaatagacccggaaaacccttttggggaaaaggcttttgccc

SEQ ID NO: 40239 - DNA, 447 bp, Oryza sativa
  Clone ID: uC-osroM202025g12b1
tttttctccaacagagccaccttttctagattttcgggtcttcaactggagggggattttgctgaaattccaagtctgttacttgagaattggtgctatgagaacatttctctaaaaatgatgtctggcttccatcaggacattacgaagtctatcactagtgaggcttgccaatcactgaaaagaaggcgtgacatatttgctggcctgaaactgaaacaagagatccttttgtgccttgttgatcagataatacatacaggcgaaaatgtgaacattgatgacttaatcaaggatcttcatccaaaggtaatgctaggtatacctttgttggaagggaatagcccaacttcatgtttttcacgtattgctattggctatgatgctgtgtgctacagttacatatggagtgaggtgtttgctgctgatcttgttgcatcaaaattt

SEQ ID NO: 40240 - DNA, 474 bp, Oryza sativa
  Clone ID: uC-osroM202025h04a1
ggggaattgtttattttttgtgggtacaaatttttttaattcattttttttttttttttttttttaggggaacaacccaccgggcaaaaaaacaaatttttggggggggacaaataacccccaacggtatacccgggggaacacaataaaggggctaaactactaaacgggggggcacaccggggcccaagagggaatgggttacggggggaaacccccccccccccccccgggggcaaattcggggccaaaacccccaaaagggccccccccggggccaaaccccccaaagggggccaaccccggggggcccccccccaggggggcggggtaccccccaaaaaggcccccggggggggggtttccgccaaaagccgttttgggttccccccccccgggggggcccggggggtttccccgggtcccccaaacctagggggggatgaaccccggcggcggaacccccacgggggg

SEQ ID NO: 40241 - DNA, 493 bp, Oryza sativa
  Clone ID: uC-osroM202025h04b1
atttttatctgatctactagctacctagtactctcatcttcttcactagcttttgcttgatcaattgcagcaatggcggcgaaggcagcgctcgttctagcggtgagcctcctggtggtggccgtggcgagcgcctgcacctactgtccggagccgtcgacgccgaagccgaagccgccggcgccgaggccgccgacgcccggtggcggcgccgggtcgtgcccgcgcgacgcgctgaagctgcacgtgtgcgccaacgtgctcggcctcgtgaaggccaagatcggcgcggtggcgccgttacgagccctgcttgctcgctgctcgacggcctcgtcgacctcgacgccgtcgtctgcctttgcaccgccatcaaagccaacgtgctcggccttaacctcaacatacccatcgacctcagccttatcctcaacaacctgcggaagatctgcccattcgactaccagtgtgcttaatcacattgggacactgc

SEQ ID NO: 40242 - DNA, 388 bp, Oryza sativa
  Clone ID: uC-osroM202025h05a1
ggtgcgctctcaacatgcggtttatttaggcacggtccacaattcatacatgtatagtggatacgtctcgttggcagacactcacggtatagtagggtagttgtgtgtacagtgatatagtcatatctgcgcgtcttttcatgccgttcgttgacttcgttcacagggtcagggtcgggtaggcgatatcgagtgtgacgccacacaggccggggccaccgacgtcgcggagaatccggatgtagccgcgctcgccccatgactggccccatgagttcttgatggtccagtacttggcgccggaagacgcgtcggtgccgtacccgacgacggtgacggcgtgcgctaggcgcgtgccgcacgggcccgtgtaaacgcccggacgcgt

SEQ ID NO: 40243 - DNA, 485 bp, Oryza sativa
  Clone ID: uC-osroM202025h06a1
gaacaaggagaataaaatagttggattatgctcttataaatgtaagtccaacaaagccacaaggcgtcctctattcaaagagatcggcatcatgaacaatatcgactctcttcagctgtaggaaacaacatatgcaattagctgctatattcttcctcttatttgtccaggacagctacaaggtgtcgtaatatccacaagaagaaatgctgcctcataaaagagtgtacaaggcccccggttccccctaataaaatcttctgtgtccatcgttgcatacaggcccatttgtttaatttccaagtatagcaagtgttcatcgcttggagaacagtccttgagttaatgatgaaaaatcatattctttgcctgattgagaggggagggaagagcaggtccggaatgtgctcttgttagcagctgcacttgcggccccatttgctgggacagatgagctagtgttgtatgctccaggtgtactaaaa

SEQ ID NO: 40244 - DNA, 422 bp, Oryza sativa
  Clone ID: uC-osroM202025h07a1
gggggagaaaattattgatggaggattactccatcttgcattccgcaagaagaccgctagttagggggaaaagagtaaaaaaagaccaaaaacgatcacaacgacgtggtcgtactccaacacgtacgtacggtactccactagaacgtaaaacctctctagaagagggaaaccggaccatatatttggtagcactttacaactagggctgttcagatcagccatgtttttttgttttttgttcttccaatcattcatcgaaaatttcctttaaccagagcgccgtttgcaattcccgctccagcgctgatgacgatctctcgttgaatgccgagggggttcctcacactgtgtagttctgctggatcgtgtcgatgtccagccccttcagctttaccaccgattcgacgtggcccttgaga

SEQ ID NO: 40245 - DNA, 475 bp, Oryza sativa
  Clone ID: uC-osroM202025h07b1
gtgacaagttttgagttttccaaaatatgtttaaattcatcaaaaatgcatttaaatttgaatatgcaaggtgggtaaactcgttttcttttcctcacaaagttttatctctcaatttgaaggaaacatattaaaaaaatggttagagtttctttcgggaaaaaaaccacaaattagagtgtcctatggtaaagccataaaactagagtgtcttagataaaatgtcacaaaactagatcaagtgtgctagagtgttacattagttatttcaaaccgcatatgtctgttatatggtaggcatggataaaagattactgttatgttgggatacttgatgttcaatacagatattgatgagtgtcaactccgaacacttgctatggtcgctgccggaatagcccggtttctttgaaagttggtgtccaagggtattccaggctgatcattcaggaacgtgcacccaaatttcctttcc

SEQ ID NO: 40246 - DNA, 444 bp, Oryza sativa
  Clone ID: uC-osroM202025h08a1
gattgaggacatgaagaactggggttacacaacaaccgaaggggaacaataggactgagaacatccaagttttttaccgaatagaaataaacgaggtttaaacgactaacatagtgcacattgcgagcagatattaacggtccatgcaacgagcaccatggacgtgggcaaaactgaacgaatcgctagatttctaaaaatgcaggcagtataaccaccacttgaacgatgcttatttcttcttggcggcagccttggtcaccttggcaccggatgggtccttcttctccacgttcttgatgacgccaacagccaccgtttgtctcatgtcacgcacggcaaaacgaccaacatgagggtactcagagaaggtctccacaaccatgggcttggtgggaattattttaaccattcccagcttaacggtttttgaggaacttgggg

SEQ ID NO: 40247 - DNA, 366 bp, Oryza sativa
  Clone ID: uC-osroM202025h08b1
agataaaacgatgactttattgtactgtcctgtgtcctcaaatatattcaaggacgcagtagacacagctatatagtattacattgctttagtacttaataatacgatgccagttattttcgacgaattttaaagcacaatcattcccaagggaggtcgaaccaaaatcttacgccttcttaaacataattaacaggatgactgctttggtcagagccattaatgaaccaccaagaatcttgggcttaactgggtttgcggaacatatctttgaaaaagctggttatattgatcacaatgtcaatcgccgtcttccttgcattttccatgaagtctgcaaaaggggagcttttaggctttttcccc

SEQ ID NO: 40248 - DNA, 324 bp, Oryza sativa
  Clone ID: uC-osroM202025h09a1
aaaaaaaaaaaaaagggtttttatataaatgggggaaaaaaaaaaaaaaaaataaaaaaaatgaaaagggaagggggaaaaaaaaaaaaaggggaaaaaaaaattaaaatttaaacaaaacccaaaaaattttatcgggaaaaaaacccaaaaaaagggagagggggggaatttcaaaaaaagggcccctttggagaaaaccaaaaaaaaaaaggagggccttatttggaccaaaaaaaaaggaaaacccaaaaaggggggggcaaaaaaaaaaaaaggtcaaaattaatgtccttaaaaaaaaaaaaacttaaaaagggaaaa

SEQ ID NO: 40249 - DNA, 474 bp, Oryza sativa
  Clone ID: uC-osroM202025h10a1
cacgccgcgacgcaggtatggctcctgatgtagttgccctcctttttttttttttttggggaaatgtgtattctggggggcaacaaattgcatcaatacaacttacaaattacaaaaatgaaaaggtgaagatataagcagaagaaaaatagaatgaaatgaaggaattatatataatcggataataatacttggacgacatcaatgtcggataacaacgtataaataggcgatcaaaacgggatatatatatgtatgtgtttaccggcgcgaggacccaaacgcacgtaggggaaataataagcggacataaaccccataaatggtcccctattaacccatggccatcatatggtgcctgccctgggggtgccccaggcaacgggcccggggaccccactaaaaaccccccgggggccggtttgtccccaagaaaccgccttggctcccgccccgccccgggggccggggggg

SEQ ID NO: 40250 - DNA, 245 bp, Oryza sativa
  Clone ID: uC-osroM202025h10b1
catcatgcccaccactaccaccgtagcattggtgtgctacgggccggtcaacaaggaggtcccgctcaactggtgcgcggcggtcaacgatatttccggctttcacatctactaggtgaagtacatggtggcgcatttacgccagccattggtcaagatccatggcatcacacctccgcgtttgccaggcggtcgtcatagtccatcccaaggactccggcgacttacacgtggagctctattag

SEQ ID NO: 40251 - DNA, 425 bp, Oryza sativa
  Clone ID: uC-osroM202025h11a1
cacattgtcgcccttctttttttttttttaaggaggcctctaaaaaagtgggtgtttcctcttataaacgcaagtccaacaaagccacaaggcgccctctattcaaagagatcggcatcatgaacaatatcgactctcttcagctgtaggaaacaacatatgcaattagctgctatattcttcctcttatttgaccaggacagctacaaggtgtcgtaatatccacaagaagaaatgctgcctcataaaagagtgtacaaggcccccggttccccctaataaaatcttctgtgtccatcgttgcatacaggcccatttgtttaatttccaagcatagcaagtgttcatcgcttggagaacagaccttgagttaatgatgaaaaatcatattctctgcctgattgagaggggagggaagaagaggt

SEQ ID NO: 40252 - DNA, 497 bp, Oryza sativa
  Clone ID: uC-osroM202025h11b1
tttaaccctacaccggccaccaccagtcacacaacacaacaatttaggattggtagagcccatctctgagccctgccttgctggccctgagctctctcttgctgcttcttttaatgggttttttgtctccttggatttgtgcttgtgctcacctgggcgtggagttctctgcatgagagagagagagagagagagagagagagagagagagagagagagagagaggacacctctgagctgtttcttcaacaagtcttcaagatttggcagagctactgagagagagcaaaggagaggagggctatagggaaaaaagtattttttttttgggggtacaaatttcttgcttgattctcttcgatcccggagagcagccaccagttgaggcacaatccttgctgttcgtgtgactgggtttgatagcttgccagatctgcggcacttgcccgatagaatccaagaattcgagcacaaactttcgtttgctgcgaaaagat

SEQ ID NO: 40253 - DNA, 399 bp, Oryza sativa
  Clone ID: uC-osroM202025h12a1
tttttatgggggattttaaaatagttggtgtattcttctataaatgtaagtccaacaaagccacaaggcgtcctctattcaaagagatcggcatcatgaacaatatcgactctcttcagctgtaggaaacaacatatgcaattagctgctatattcttcctcttatttgtccaggacagctacaaggtgtcgtaatatccacaagaagaaatgctgcctcataaaagagtgtacaaggcccccggttccccctaataaaatcttctgtgtccatcgttgcatacaggcccatttgtttaatttccaagtatagcaagtgttcatcgcttggagaacagtccttgcgttaatgatgaaaaatcatattctttgcctgattgagaggggagggaagaagag

SEQ ID NO: 40254 - DNA, 224 bp, Oryza sativa
  Clone ID: uC-osroM202026a03b1
cgagcacttctctctctttttgttattagctatagcagcttaattagctgggggacaaaaggtacagtaaggctgagctagctacacactaagcaagcttattagccatggtttcattaccaagtctgtcattggtgaccagtgctctgctgatgctgcttgccgtggaatgccaggctaacccttactggctactggagttgttgtacttaccccgacaagtg

SEQ ID NO: 40255 - DNA, 230 bp, Oryza sativa
  Clone ID: uC-osroM202026a12b1
cggtccggaatttctggcaaactatatcacgtttgattatgcccgtgtaaaagctgtggaactgggggtatttgatgctcagctgagcgcgcttcatccctgcccaacgggcaacatcaccatccttttgctcacagaatacacaatatagctattattttaccttgaaaagattccaaagcagctgtgcgtgctactgctggcctgcctggcaacactagcagttgttt

SEQ ID NO: 40256 - DNA, 104 bp, Oryza sativa
  Clone ID: uC-osroM202026b01b1
ctaatactcatcctggagaagataccaatccttggggggcatttgtggaggcttctcaagactgccctgaaggcactaactatgcgtgggttggggagcgccca

SEQ ID NO: 40257 - DNA, 455 bp, Oryza sativa
  Clone ID: uC-osroM202026b03b1
gtttctgtctgtttgcggctcaaggtttcagcgaggggcgccttcacctcgcctcgtctcgccttgctagtagtggtcgcggcggcggcgttcgtcttcgtctcgccggcgatggctttcccgatgggattgccggcgacggcgaacccgttcccgaacccgtggtccgctttccagaacctctctgggtgccacgccggcaaggagagggaggggctagggaggctcaaggattacctcagccacttcggctaccttccgccgccgccgatgtcgtcgccgtacagtgacgcgttcgacgactccctggaggccgccattgtcgcgtaccagcgcaacttcagccttaacgcgactggggagctggacacggacaccgcggaccagatggacgcctcgcgctgtggcgtctccgaacgtaattaacgggacatccacccattggacaggaactc

SEQ ID NO: 40258 - DNA, 435 bp, Oryza sativa
  Clone ID: uC-osroM202026b05b1
gccgaccaaagcacgcggttaggcaaatcgacgaacacatggcggccatggccatggaccacgaccacgaccacgcctcgtcgccggcgccgcccgcgaggctccccgcgccgccgtaccaccactccccttctgctgctgctgctgcggcggtggaggaggtcgcgacgccgccgcggaagtccgcggcgggggcgggggcgcagaggtcgtcgcccatgccgtcgccgctgcagctgtcggggtgctcgctgcaggagctcctcctgatgtccccgccgcccgggtcggcgcgccgcaactggtcgcggcatcgcggggctgggttggacgagagcctggagatggtggcggcgccggcggcggggacgccgccgaggcggaggcggcgcgtggccgcggagcaatgcgcggcgcccgcggtggcgtcgccca

SEQ ID NO: 40259 - DNA, 556 bp, Oryza sativa
  Clone ID: uC-osroM202026b06b1
ctttttctctcctctctctccctcttccgccgccgcgcttggggaaggaaggagaaagcaagccatcggcccccgcctccgcctccgaagggacattgttgctagttggtgatggctgagcaggctaatcaaccgactgtccttcagaagttcggtggccagttccaccttggctccagcttttctgaaggtgtacgggctcgcaacatctgcccatctgtctcatcctatgacaggcgctttaccacaaggagctacatgacccagggccttgtcaatggtggcatcaacgtcccaatgatgtcgtcctctccaatttttgctaatgctccagctgagaaaggtggcaaaaacttcatgattgatttcctcatgggtggagtgtcagccgcagtttcaaagactgctgctgctccgattgagcgtgtgaagctgcttatccagaaccaggatgaaatgatcaaggctggtaggctctcagagccatacacgggtattggggactgcttcggacgcactatcaaggatgagggttttgcttcattgtggagaggaa

SEQ ID NO: 40260 - DNA, 411 bp, Oryza sativa
  Clone ID: uC-osroM202026b07b1
tctgccgccctttttttttttttttttttatggaacgaaacttatttgttcctcatcttattctctgatgaaatttcaaaaggagagcgaaacagtggacactgacgcttgcgaaataaaaaggtggcgccagaaactccggcgagactacggcgacgagacgcccgacgacaacgaccatgacacgatacaaccacacactgggtggagattaccgtcggcgacggcgacgaacacgacggcgacgacgactgctcagtgcgacaggtacaatggaggaggagaaggaggtgcaagaactcctcgcgtgaacaccaagaagccggcgatggctgcctcggtcacacggtgagcccccgcatgaacttccacttcgtggcatcctacttcggcgcgccgggggtcgacccc

SEQ ID NO: 40261 - DNA, 467 bp, Oryza sativa
  Clone ID: uC-osroM202026b12b1
tcgtgatcgagatgctcaacacggcgccctaccggttcccgaacggtactcagacggacccgaacctcgacgggaaggtgatgctgttcaaggtcgccggcaaggggaaggtcgacgacatgccggacaagtccaaagtgccggagcacggtgtgccgtacgcgagcgtggcggcgctcccgccgtcgacgacgacgaggtacatcgtcctgtacgagaaccagaccgcaccggggaacctctacatcaacggcctccgtctggaggacccggtgacggaaacgcccaagtccggcacgacggagctgtggcaggtgatcaaccttaccggcgacaaccacccgctgcaccttcacatcgtcacgtttcaggccgtcaagatgaccaaaatcgagggattccaggagttcaagaactgcatgatcgccaacaacaacaccggcacgtgcaacctcacccagcacgcc

SEQ ID NO: 40262 - DNA, 420 bp, Oryza sativa
  Clone ID: uC-osroM202026d03b1
tatcttctccctaccaacaaccaccaccatcctgttcttggcacttggcatcaagagacacatccagacgcctcgagttgtagctagcaccagtggctcagcttgcccagtgctgctgcatcgatcagtggcagtagctagctcagctctagccttttgccaccgaccgctccgatcgaatccggtgctaggctagccagcctcctcgctctttataaccccagccgtcattgaagagggagggagggagctagagctttgttcttgctcttgcatgctggccttgcagatcgagtgagagaggtggaaggaagaaaggagggaggcacatgcttataccgttagtgctggagttcctgaacgatgtcgtctgtgaacagcgagatcctcctctcggggtttatgatcaacttcacattc

SEQ ID NO: 40263 - DNA, 517 bp, Oryza sativa
  Clone ID: uC-osroM202026d04b1
cgttttgctcctccaaaatcgaagagaaaatttccaacaccccaccctcccccatcgcctcctcctcccgtctcggccggggcggacataaatacgagccgctcgacggggaaccgccgcgccgcgtccaccacccaccacaagctcgccgccggcgtcgcggacggcggctcatcccggtccggcgtgcgatccggctgactggccggagacctaggagcttcgaccccccccccccccccccgcgatctgggcggcccatggtggggtcggtaccgcagggcggcagccgcggcagcgagatctagggttttcggcgcctcgggggtggggagggagcgatggggcgtcggaaggtcgccgcggcggcggctgcgacgcccccgcgtggctcgtcgaaggccgggggcggcgtcatatccgaaatccgtgagaaacacaaattggacctggagaatttgacactaacaaagcatccattcaggacattacgttttttaatgttagctatgttgca

SEQ ID NO: 40264 - DNA, 373 bp, Oryza sativa
  Clone ID: uC-osroM202026d06b1
gttatttaagcgggggctcccgaccggcagcccaggacaaactgtatatggtctgagcgacaggatggttcggggtgcgatggctgctgcagaccagagctggcgagcgacagatgcttaacatgcgaccagctacggaagcagttatgggccggcacatggagcgaggtgatgatggacttcctctccggaaggaaaacgacgcaacagcatgagactaccggaggcacgctaacgctgtgaatgttgtggacatgggtggtggcctccaccggaaggatgaaatggagaggagagatgttatgtcaagaggggtgacatccacggacccgaagctgatgatgttgaggctgatgctgtctctaacgaagca

SEQ ID NO: 40265 - DNA, 97 bp, Oryza sativa
  Clone ID: uC-osroM202026d07b1
tatatccaccgccgtccttctcctctctcccgcgatcaccgtccacgccacccaccaccatggcctcctccgcatacgaatttcccgacgatgccta

SEQ ID NO: 40266 - DNA, 80 bp, Oryza sativa
  Clone ID: uC-osroM202026d09b1
tatatttacagcaaaaaaaaatgaggttgtttggatggatagatggatcgatcgagattagcaacaagaagaaggataag

SEQ ID NO: 40267 - DNA, 568 bp, Oryza sativa
  Clone ID: uC-osroM202026d10b1
ttttccctctcactcccagatacctgctgctgccactagcccactaccatggatccttgcaagttccggccgtcgagctcgttcgacacgaagacgacgacgacgaacgcgggagctccggtgtggaacgacaacgaggcgctgacagtggggcccagggggccgatcctcctcgaggactaccacctgatcgagaaggtggcgcacttcgcccgggagcgcatcccggagcgcgtggtccacgcccgcggcgcctccgccaagggcttcttcgagtgcacccacgacgtcaccgacatcacctgcgccgacttcctccggtccccgggcgcccagacccccgtcatcgtccgcttctccaccgtcatccacgagcgcggcagcccggagacgatccgcgacccgcgcgggttcgccgtcaagttctacacccgcgagggcaactgggacctcctcggcaacaacttccccgtcttcttcatccgcgacggcatcaagtatcccgacgtcatccacgccttcaagcccaacccgtgcttccatgtccaggagtactggagggtcttcg

SEQ ID NO: 40268 - DNA, 563 bp, Oryza sativa
  Clone ID: uC-osroM202026d11b1
tattttccccaaccctaaccctaaccctaacctccccctccgccgcgccccccaccgcgtccgctgcgccaccgacgccgccgccaccaggcaccggcgcgcggccgacgagaacatccgggaggaggcggcgaggcaccgcgccccgaaccacaacttctccgcgtggtacgcgcccttcccgcccgcccccaacggcgaccccgacgagcgctactccctggacgagatcgtctaccgctccagctcgggcggcctcctcgacgtgcgccacgacatggacgcgctcgcccgcttcccgggctcctactggcgcgacctcttcgactcccgcgtcggccgcaccacctggcccttcggctccggcgtctggtccaagaaggagttcgtcctccccgagatcgaccccgaccacatcgtctccctcttcgagggcaacttcaacctcttctgggcggagcgcctcggccgcgaccacctcgccgggatgaacgacctctgggtcaagcactgcggcattttccacaccggatcgttcaggattctcgcatgacggtgctcgt

SEQ ID NO: 40269 - DNA, 129 bp, Oryza sativa
  unsure (1)..(129): unsure at all n locations
  Clone ID: uC-osroM202026e07b1
taatgnagcctgcgagcgtccagtcttggtacggtggattgattttgcaccaagacgggaccaccgcctgaagcctcggacattcttgtatctgtagaatcgaaggggcaccttaagtggcttattact

SEQ ID NO: 40270 - DNA, 506 bp, Oryza sativa
  unsure (1)..(506): unsure at all n locations
  Clone ID: uC-osroM202026e08b1
tatatctctctctccgatccggatcttcctacccactccggcgagccctcgccgcgtcgcctccacgcgactcgctcccgtatatcggcgcttcccttagccgctgccgccgcccgcctataccaccagctatatccgattgcctcctccccctttcgcgcctctgtcccgcgccccaccaaaccctaggcgcgccgcccatggacatagagaccgacggtcgcttcggcaacaagcgcgtgcaccaccgcctcggcccggccaacggcgccgcctactcgtccacctccgggaaggtctgcatccactggcgcgccggccgatgcaatcgcttcccctgcccttacctccacagcgagctccccgaggcgacagccaagcgcccgagccaaagcggcggcggcgggaacgtctggaggaatccccactcaggaggtggagggggccgcggcgccggcggcgccgggggcccgaacaaatggnggaggggccccggaggtgcggat

SEQ ID NO: 40271 - DNA, 560 bp, Oryza sativa
  Clone ID: uC-osroM202026e11b1
ttgttgttttcccaagctgagagttgtcgtgcgagagtgaggagcatggcgatgctggggagctcgtcggcggtggtgctggagctgatgacgatggggtaccagtcggcggcgtacctcggcgagctgctccgggcggcgtctccggcgcaggcaggggatgagcagcaggagctcgccgcggagatcctccgctgctgcgaccgcgtcatcgccaagctgaaccggggaggagccactggtgctactaccggcaagaagcggaaggcggcggagtccgccgccgccgccgccgtgacctccccttctctccccgtcacgccgaccaaaagaagggcgcgtggcgcggaggcggtgagggaggtgaggagcggcacgacgacggacgggttcatctggaggaagtacgggcagaaggagatcaatggctgcaagcacccgaggctctactaccgctgcgcgttcaagggccagggctgcctcgtcacgcggcgggtgcagcagtcgcagtcgcaggacgacccggccgcggcgttgtgatcgcctactacggcgagcac

SEQ ID NO: 40272 - DNA, 316 bp, Oryza sativa
  Clone ID: uC-osroM202026e12b1
aatatttatcaaaagaaggcagatacaaggggggggggctcaactctgcacgccacccatttgcatcccaagctcgaggaaccgacccatcaaactatgcctgtgactatgcaaacgcattttggccgtccctccttgcatatgatagcacctggctagactgggtacatggcaacagtggctaaactgaaagaccccgctaacaagtggcggtgatgtagctgctacttttactcaattgatgagagtcaagaggcattcgctaggtcctggaataattcactataggaaagcctgctatccatccttctacatt

SEQ ID NO: 40273 - DNA, 458 bp, Oryza sativa
  Clone ID: uC-osroM202026f03b1
cgagctcacgctacactacacagcctggggcgctgtagcgcacagggggggatgctaacttgaggactaccatgggatggatgaggttgcgctgcagggggtgagctcttatggtctctacctatgctcatggaaacgtgtgtgccggtcctggcgatggatcgagccggcatgttaaggagaatactatcactcaaggcaatggataccgcgcaagaactccaatcacaagatcaacgcagtgggacgaaacttggatggccctgggccaagctgcatccgcaagattgccttgtgaacgaccgaggccgagcggtgcaacatggcaacactacccgcatacaacaacaacaacgactagtactatagcatgaacctccatgaggagcaacgacgacgtcaacgtgttcagggtcaacaagataggaggttgcaccaacagcgtcacctgtggcggc

SEQ ID NO: 40274 - DNA, 500 bp, Oryza sativa
  Clone ID: uC-osroM202026f08b1
tatcactgtgaggtcgatcggcatccggcgtagtgagaagatcgcgtgctacgtgacagtgcgtggtgagaaggcaatgcagctcctggagagtggcctgaaggtgaaggagtacgagctgctgaggaggaacttcagtgagactggatgctttggttttggtatccaagagcacattgatcttggcatcaagtatgacccatccactggtatttacggtatggacttctacgtcgctcttgagcgtgctgggtaccgtgttgcgcggcgccggaggtgcaagtcccgtgttggtatccagcacagggtcaccaaggaggatgccatgaagtggttccaggtcaagtacgagggtgtcatcctcaacaaggtccaagccaacactttctaagcatcaccagtgcctagttctctttagaacttaagttatttggatgttggatttgtatgcttcttaaaactaaagatgttttgttattttgccaactttgagttggatc

SEQ ID NO: 40275 - DNA, 557 bp, Oryza sativa
  Clone ID: uC-osroM202026f09b1
tatgctgcacgagcacacgagaaaacaagagaagaaaagcagcagcggccatggagggatacgaccgcgagttctaccagttcagcgaccagctgcggctgcagacggcgagcttctccggcctctccctcggcgactccatctggacctccccctccgaccgccgcaacgagccggccttcgacggtgagtaccaccacttctcctccccctcccccgccaagaacgccatcgccaacatcaacggcgtcgccggaaacctggatggcccgggcctcatcggctccggcaagctcgccttcggcgccaccaaggccgaccgctacaacagcgtcaacctccccgtcgacaacaacaacaacaacaagtcctacggcggcgccgccaagatcaacaacaacaacgtcaacgccttcgggttcaacaagatggggggttacaacaacagcagcaacggcggcggcaactacggcggcaactgcagcgacgtgaagagctacttcaacaagtctggtcggaggctcgggagcaacaacaacaacaacaatagtaacggc

SEQ ID NO: 40276 - DNA, 360 bp, Oryza sativa
  Clone ID: uC-osroM202026g01b1
gtttgtggcacgagaggaagagcaaagtagaagagcatctactgcacccacaattgtttgtataccactaatattaacggcccaaatgggtggtatgataatgatacctaggttaactagagttagcattgatcggtggattttatcgtgcacccactctttgtacccatgttgtattattgtaggcgtcatactgactacgtttcacgatttggatgtgattactaggactggtagatgcctccttttttcttctcagtgtaaaacttatgagtagtttgtgcagatggaagaacaaatggtttgtttgtagtattgttgtagcagtaaatggctagccatctaagggacctagagatg

SEQ ID NO: 40277 - DNA, 561 bp, Oryza sativa
  Clone ID: uC-osroM202026g05b1
cttttcttagaatcttcccactgacaagctaaggattatatacatggcagttaatggtgttatatatgtaatccaggtttgcatttggatataccttgggacaaatgatagtcctctgctagagcctgtgagcaaaatttttatatcagatgtctcattcttagctcttttgggattcttaatttatggtggaaggctatttttcatgctgaggcgttttccgattgaatcaaagggccgcataaagaagctctatgaggttgggactgtgacagcaatttgcttcacatgtttcttgataagatgcattgtggtggcgatgtcatcatttgatcctgatctattttttgaggttttggatcatccaatactggatttcttttactatatgttaacggagatactgccctctggtcttgtcctattcatcctccgaaagctttcaccgaaactagtatcagcacagtacccccctattcgttagaagggctggttttgttgttacaagcattccaaaaacttgtttcaaagcgagaattgtgatatttgagctgagctttc

SEQ ID NO: 40278 - DNA, 514 bp, Oryza sativa
  Clone ID: uC-osroM202026g10b1
tggttgtggtcctcgctgcgtgctacaaggccctgaacgagcaccatgtcctcctcgagggtaccctcctcaagcccaacatggtcaccccaggctctgacgccaagaaggtgtctcccgaggtcatcgctgagtacaccgttcgcaccctccagaggaccgtccccgctgccgtgcccgccatcgtcttcctgtccggtgggcagagcgaggaggaggcgaccctgaacctcaacgccatgaacaagctcagcaccaagaagccgtggtcgctgatcttctccttcggccgtgccctccagcagagcacgctcaaggcctggtccggcaaggcggagaacattgagaaggccagggcggccttccttaccaggtgcaaggtcaactccgaggctaccctcggtacatacaagggtgacgctgtccttggcgagggcgcctccgagagccttcacgtcaggactacaagcactgatttgccttggaggtgctgggttccataggaacattctgc

SEQ ID NO: 40279 - DNA, 457 bp, Oryza sativa
  Clone ID: uC-osroM202026g12b1
tatagctccaatctgttcatgccaatggctgctggcacctgggtgaagctagagcagaagggagatgggccgggagcaagaagctcccacgccatcaccctcgtcggcggcacggcgtacgcgttcggcggcgagttcacgccgcgcgtgccggtggacaacgccatgtacgccttcgacctcaagtcgcagtgctggtcggcgctggacgcctccggcgacgtgccgccgccgcgcgtcggcgtcaccatggcgtccgtcggcgccaccgtctacatgttcggcggtcgcgaccaggagcacaaggagctgaacgagctctactcgtttgacacggcgaccaacagatggacgctgctgtcctccggcgccggcgacggcccgccgcaccggagctaccactccatggtggccgacgccgcggggggcgggaaggtgtacgtgttcggcgggtgcg

SEQ ID NO: 40280 - DNA, 428 bp, Oryza sativa
  Clone ID: uC-osroM202026h02b1
gattttcgaaggaaaggactacggcatacatggggggattgtgcaagtacgaagcctagaggaccactctccccttgccggtgttactcttggtgatatcggcggaaaatttggtagtggtgcatacaacagtatggatcatggagttctgcgaaatgaccatgtgcacatcccaagggatcaaatgttgatgaggctttcacaagttacgaaagagggaaaatatgtgcactcagatgtcccaaaacagctgctttatgggacaatggtttttgttcgacaaacaattgttgcagatgcttctaaggctttatcacgtgctacttgcattgatgtaagatacagcgctattcgaaagcaggttggccctcaaactggtggccctgagactcaagtcctcaattacaagacttagccaagcaaactct

SEQ ID NO: 40281 - DNA, 82 bp, Oryza sativa
  Clone ID: uC-osroM202026h11b1
tataagttgagaggtacatcatgttgtaacactagtggtacagacaggccttttgaattagaaggcgatcattcagagcctc

SEQ ID NO: 40282 - DNA, 303 bp, Oryza sativa
  Clone ID: uC-osroM202027a01a1
agctggtccagatcaaagtagcatacatcagcagatcggtgtacacataatcacatataataatatacacggcgctgctaattacacatggaagcatcagtcatggtctcatggattcagatcgatattactacccttttattacatcatttctaggtcaaaataatgacaaacagaagcgagcacatctagatgacctgacactgttttactccgtcttggccttgtcagccgccgtcggttgcagcggcattacggcacatcatcttcttgaactccttgaacccgacgcaaccatcgccg

SEQ ID NO: 40283 - DNA, 252 bp, Oryza sativa
  Clone ID: uC-osroM202027a02a1
aaagaaagattacaagtgtatgccgtttatttatctctgttttcttttcctggttttaagtacagtttacagccttctctacttcccaaacaaatgtaccgggcagatcatatatacttccttcgtttcacaatataaggtcattctagtattttccatatttatattgatgttgatgaatcatcaacatcaatataaatatggtaaatgctagaatgacttatattggaaaacggagggagtactaattaa

SEQ ID NO: 40284 - DNA, 435 bp, Oryza sativa
  Clone ID: uC-osroM202027a03a1
atcacaaaaatttcttaacttttttcttttcatttaaacgcttttcgaagcaagtaatacaaaggcctttctccatgacgacatactctagatagtataaagaaaacggtaacaaaacgttcaacagtttatacatgcatgcataattaattaacttggcctcttaattaggcgtgctccggcgagttgttgggcggcgtggcggcggcggcggcggcgttgatgacgttgcggcggccacgctcggagcgggagttctcggcgaacttgagacttgcaccgtggaggcccttgctcttctcctgttcgctccactcggagccgtagtagtgctcctcctcggcgccggcgttgggcgggaggaacatggagccccactgcgggaaatggacgagcaccaccggcagggtgcacgccatgatcatgatgcccatg

SEQ ID NO: 40285 - DNA, 497 bp, Oryza sativa
  Clone ID: uC-osroM202027a05a1
ttttctttttttttttctttttttttccaatggaatctgtacaaatattattatgcaaaggattgttttctggaagtaaagaaaccgggcaggacacatgtaaatagatgcatcaagacacgatacgtcttaaaaaggtttgtctattagctcttgaataaaaagtgaagaatgtgtttgatagaaatgattctgcaggcggattgttcttcatgtacctttgtttggttttagtataattggcggggttgttcacagagtcagtggacaaaaaaaatatatagcagaacacagctgcttatccaaatgagattttgatgactggaaaatagcttctgagcaatacaatgccggactagtggtcatagaagcatcagtgaaagtggcatcacatattcatttatgttagctaaggtccaatgtttgcctcacattgtggtatctgccatgtgcccatgcctgaaaacgaaaatggatgaatgtagtcagtgagatgc

SEQ ID NO: 40286 - DNA, 365 bp, Oryza sativa
  Clone ID: uC-osroM202027a06a1
tttcttttttaacacaagtggcccgaagcgggccttatcctgctccatgtatgaaaaaaatgtaccagagcatgcagcttactctgactatcatatcgatcgccaactggaaagcgaccatggcctatgagggcgcgctacaatgggcctcctgcatctaggagttcaacaacaactagacgctgaacatgttgtccactttctaccacttcttccaccaggactgcatcgacacgtggctcgcgtcgcacgccacctgcccggtctgccgcgccaacctagtcgacggcgcgtccgagccggcgagcgatgtcgccgccgagctaccgactgagcccgctccgcgcccggaaggcgcgacgccg

SEQ ID NO: 40287 - DNA, 239 bp, Oryza sativa
  Clone ID: uC-osroM202027a07a1
tttttgtttgtttaggggtaacgattcatcgtagaaacaacgggtggcaactcaagtaagccacgtcagttgaatttgcctatcattattgacagctttgttggttttggacaaagaaaacaaggaaaatggtgctcaaaaaaatttcctacacgttgcacacacaatgtgcatggacgaggccataatatactgatgccaaaagaggcaattatcttgcctttgcagaatgtaaacat

SEQ ID NO: 40288 - DNA, 317 bp, Oryza sativa
  Clone ID: uC-osroM202027a08a1
aaacaaataaacagttttgaatgtggtgtgcattttatctctaagcacttcggtccccccggtacaattggttaattctcagttcttgaaagccatagctataaactagtatcaagaactctcatccattttcgaagattcctcgacgcccttgaaagtaacacgcagcttcctcagagaggatactttcttcccgttgttttctgccattccagttacatgcacagtcgtgcgtgcagctcctttgagtagctcaaacattgggacacccaggtttggtcgggtcatctgctctaggacttcaggtgcctgcatgt

SEQ ID NO: 40289 - DNA, 117 bp, Oryza sativa
  Clone ID: uC-osroM202027a09a1
ctgtccatcaccttgtttcttggagaactcctccaggaaagaaggtgatggacagaaaataaaaaaaaaatcccccctttttgttcacttcctgctactatacacaacaaaagctca

SEQ ID NO: 40290 - DNA, 369 bp, Oryza sativa
  Clone ID: uC-osroM202027a11a1
acgtgcactgcaccgtaacgtaagcatcgctattactgtaggagcggcctgtggtgtactacttttaccaccacaggtgtgcccggaaccgagggccttatcggtgcgcggatggcatgaaaaaactgtaccaattgcttgcaggttacctgattatcatatagaacgacaattggaaatggacaatggcttatgagagcgatcaacgatgggaatccagcatctaggattacagaatcacatagaaactgaacatattgtgaactttgtaacaattcgtagaacaaggatggctagacacgcgactagcggtgcatgactcacagctggtttagcccgtcaagcaagcatgagctgaaccgagccatg

SEQ ID NO: 40291 - DNA, 376 bp, Oryza sativa
  Clone ID: uC-osroM202027b01a1
ggggcgaattcttacatattcacttctgcaagcagctagctttacaaataatctcaagcacatttgagaatgagataatctaaacaatggctacgttacaagtagaatccaaaaatcttaataagggtcaagcttgactatctgttgaaatctgcaaagcttctatactactccatctagctgttgagagagagagccttcaggctcgggcaatcttcgacgcacggggtggatggcatgatgcacccagggcacgacatcacgccgttttcccatggcgcggcggccaggccggtgaggtcctcgcggcagatcgggcagggggtccccttgaacagccccctggtgatgcacggcgggtggaacgcgtgccccc

SEQ ID NO: 40292 - DNA, 359 bp, Oryza sativa
  Clone ID: uC-osroM202027b02a1
atcaatatatatgcgtggatatcgatattatatcatctatcaataaatgtcaggaagcaagattatccttgcttgccatacaaagaattcgctgcaacattttagctacagttgcttaacaatgcgaatagcagaaatgggatgctaggagtacaatcttctcaacttctcaagcttgtcaaaagaattggggctcaataatctgaacaccacatgtatccttggctctcatctgattctcatcagtttatcagctgtcaccccttcgtgacatgaaactgatccccaattcaagttcagagaggcctggtccggcgccccgaggcccgaccgcagaggagcgcgttctttgggatcgg

SEQ ID NO: 40293 - DNA, 339 bp, Oryza sativa
  Clone ID: uC-osroM202027b03a1
gctgtaaattcgacgagctgcttttattatttccaacagatggaagaaaagttcctctatacactagaagcggtggcatactggcatctaattgctacagtatgaacttcttttattctgacaaatgtcagaattcacaacccttgaagctccaaccaattcacagataccaactttacttgccactccagttcaaaaaaaaaaaaaaaaacaagaagaagaagaagaagaagaagaagttcacttgccaagtagccactcgtttattttaagactagaatgaacatctcctggacggaaagccagaggatgcttttttgaatgcccattcagtaacct

SEQ ID NO: 40294 - DNA, 431 bp, Oryza sativa
  Clone ID: uC-osroM202027b04a1
ggtggacaatacatttgcaagcttcattgaacatttatgtagcgaacaaacagttcattgacaacattttgcaaagtaggtaggggtgctcaatcatagcagtagcacatggtgtccaaaccatttacacgaatagcattaacacacgtacaaagacttgggcacaatcaaatagagtttatgtccctaggagatttggcgaagctaacataacaagacacctttttttttaactttcacaatagcaaaccatgtagtacagaccataaggcagactccatcttaaaactgttagacttcttggttttcagaaaattccctacagtcatttgatctccatcttgcttttgactgtggggcagaaaccattctagttgcggtttttggacttatcaactgcccttggagcaagtccaattgcatctgaaccc

SEQ ID NO: 40295 - DNA, 531 bp, Oryza sativa
  Clone ID: uC-osroM202027b05a1
gatccgcctccgtcgttgtagtcacgatgcaagcgcagattgtggcgcctccggacttgcagtgcaaggacaagttcttggtgcagagcgtggtcgtcgacgatggcttgtcagctaaggacatcacctctcaaatgtttctgagagatgagaacaacatggttgaggaggtgaagctgaaggtttcttatgtgatgccacctgaaccagcgatggagattgcagaggagtctgatattccaaagagaattttggtgcctatgcagcggattttggataatgggaggagtggttcggagctgtcaagtggtaatgtctcattgagatcagctgagatggggacagagttgggatcacctcttggacgatttgtgagaaatgaggatatgctgaagactgcaagtcctgttgttgaaacaagagtacatgcaggacctgatgaacaatacctcgagctgtccgctttggttgcaaaatgaccgaagaaaagagtctgcacttgagcaaataggaaacttcgagagagctgag

SEQ ID NO: 40296 - DNA, 355 bp, Oryza sativa
  Clone ID: uC-osroM202027b06a1
gttggaattcttgtatacaactattttataaaacccaatgagaggggcaaaaattaatagagtaaatatcagctgttcttcatcaatctagagctccctttgggtatacatgcttctttgttgatgaacaatattatttgcgaacagcttaaatatgtactaaaaaaccatctcatttgaatcaaattaagcaaacgaaggggaaaaattaattgaaagaaagaacttctttttttttggttagctaggttgctatgagcctctgatgatcatgccaccatttgctcctgctccggccactgcgcgaatatttcgccggcggcgtggccgttcttgacaagagagtttacccatg

SEQ ID NO: 40297 - DNA, 160 bp, Oryza sativa
  Clone ID: uC-osroM202027b07a1
ggatgtcttaagagccttgagatggataggcatatatctatttaattcatcatcttggtcaacaggttcagcccagtccagtcctagcaaccataagctaattatgtactacgaaataaaaaagagagagaaagatattaacttctctgcagttaggcaa

SEQ ID NO: 40298 - DNA, 129 bp, Oryza sativa
  unsure (1)..(129): unsure at all n locations
  Clone ID: uC-osroM202027b08a1
tttaataagaatggagnatnattggcaccaacatgaggcacgctgcagctcatgccgaaaggctgcgttattaaaatgtacacattcgccatacaaaagattttaaagtaaacagctagacatttgatt

SEQ ID NO: 40299 - DNA, 493 bp, Oryza sativa
  Clone ID: uC-osroM202027b09a1
ataaaacaaaacaacctttttttttttaaaattttttaatataatttaaatattattttttataattttttaatttttttttttaaaaaatgaaccaaaaaaaatttaaaaaaagagaaaacaattttaaaaaaaaagggctgtttgaaaaaaatcaaaaaccaaaaaaaaaatccaaaaaaaaaaatgagaaaatattaaaaaaaaaattccaaaaaatttaaaaaaaatattgaaaaaaaattcaaacaaaaatcaaaatcaaaaatttaggggaaaaaaaaaaaaattttttgaaaaaaaaaataaaaaattaaaaaaaaaagaaaaaaataaaaaattaaaaatctttccaaaaaaaaaagcctaaaaaaaaaaaaacccgcaaaaaaatttaaaaatctcaaaataaaaagtaaaaaaaaaaaaaatgtaagggggtaaaaaaaccaaaaaaaaagtttttaaaaagagaaaaaaaatttttggaatt

SEQ ID NO: 40300 - DNA, 294 bp, Oryza sativa
  Clone ID: uC-osroM202027b10a1
ccgtcttttgttaccaggaaagattcaggataagtaattgcattgtttgcaatagcttacatcggcacaaaattacaaaattatgtaaaaaaaaggagttacaatatcgtcatttgaaaccaattttgatggcccatagattttctacattaaattcacctcacctggagagaaacttcagtgatctctttttgcctactcaacttagggttgctagaccatgcgtagctgttagtggtgttgctgctgtacccaccacccctaagctgccactcagggatgtagcttggcttg

SEQ ID NO: 40301 - DNA, 263 bp, Oryza sativa
  Clone ID: uC-osroM202027b11a1
ggcaacgttgtccctttatttaaaagtataatccttgtgcatatatactccgtacaaaccacacattatatgacaataatatattacgaattcttattgcaccgacacgcatatatatcatcagaatatcagaacctttagcccgctggcactgcccggattactgcaatttaatttcgcttgatatttccaaaggggatcgcgtaaaactgggctcagcgtggacgaggtggttacatcgggcttcttttgacaaaccggcg

SEQ ID NO: 40302 - DNA, 334 bp, Oryza sativa
  Clone ID: uC-osroM202027b12a1
ggcttcaacatcaaaacttcttatatcacagacaataacaatacaatgaacattttcatgcggagtactaacctacaacacctctcagatcgaggacaaagcccagagagaggaaaccacccatcgtcttcgtcgcattagatacacacatttgcaataccggcaaaacaccgccaaacgggatgctcctggagcacaaatgtcgctcagcagttcgaagttggcgcagctgttggtggtggtggtctcggagctgccgatgaacgggtcgatcttgacccaaaggagggagaagaccgaggcgagcaggacagaccatagcacgacgatggtg

SEQ ID NO: 40303 - DNA, 237 bp, Oryza sativa
  Clone ID: uC-osroM202027c01a1
gaggatcaccacgatgctgcaccctcgttgcttggctcttttggccgccgcctttttttttgtttttttttttttttcttttttttttttttttttggttcaagagagaaaaaaataacccttcatgattccgtttggaaaaccaaagggttcacaatttcttggaagattcccatggggcacttacctggacccgggtgaaggggccaaagagacccctctcaattttacagcgcg

SEQ ID NO: 40304 - DNA, 343 bp, Oryza sativa
  Clone ID: uC-osroM202027c02a1
gacaagataaaacaaaattaagttcgtttaacatgcgcgcgcgcgtttaattggtaactagtgctctagcgagaccacccacgcggtaagcttgaatcatatcggcaatgtatggttggccgggatgcgtgggatccatgactttggaggtggcatccatgccagcatcagacatcactgcgtccatgccgccttggtgctcttcgtttgcaaacgaagtcacgtcatagaccttgtctttgataatgacccacaagtcgtttttggtattgtgcttggcgacttcggccttggtgaattttttcaacacaggaggcgctggttttgatgtggatgtcttcac

SEQ ID NO: 40305 - DNA, 327 bp, Oryza sativa
  Clone ID: uC-osroM202027c03a1
aaacatacatgtaatacgatgttgaattaagcaagcaaatttaagcatgcagagggcactgtttagcacacactgcatgtgttgctagctagctagctccatttagttcccttttttttaatcatgattgacacttgataaaattaagcaagatttagctagctagctgagctgatctgatcaccatgcatgcatgcaagcaaggccaattcaatttaaagctggccggccttaccccacacagtacatatacggggggtaaaacaaaaacaaaagggaaatcatccccaccattggttcattcatccatttttttaattaattgac

SEQ ID NO: 40306 - DNA, 404 bp, Oryza sativa
  Clone ID: uC-osroM202027c04a1
aacagttgaactggatgtattcacaagatcaccgaagccccggagttcagatggtagcagctaaagctagttctgccagcatctttacatcacatggtaactcggcaactacattacatgtataaaagagcaaacaaaatgacgtacacagttgaggatgaccaacagaagattcagctcaaaacaaagctagtattactgggtagtacggcaagcatgatcagaaaaatcgatttagacatagtagatcatgccgacttcgacgaggctaatgtggggtatgtgcagcgccaccgcgggacccctgcagttcttgcggaggaacgagtaagcgtagtcgatggcgaacgtcttgaggaagttggagttcttccttgccttcacgtaggagtggccgatgatgt

SEQ ID NO: 40307 - DNA, 424 bp, Oryza sativa
  Clone ID: uC-osroM202027c05a1
cacaccatataacatttttccgccccaggagagaatgcagtctcaaaacatctacaacttatctgcagttatgcagaagtagggattaaaaagccatacacaggagaatcacactatttaacattttcctgccccaggagagaatgtaatatcaaaacatctacaaccatatctgcagttatgcagaagtagggatacaaaggacaggtggcaaggaaatctagttaacaactgacatctacaattaaaaaaaaatcaatcaaatactagaaaaactaaactaaagagcacaagacccacgaatggggaaaactattggttatgtcagtgtggatcattgaaggtgccatctttcttcaaggattgatgttacactcccgcaagaagggctggtcataatcgaggtatgccgaccagtagtttc

SEQ ID NO: 40308 - DNA, 511 bp, Oryza sativa
  Clone ID: uC-osroM202027c06a1
tttttgtttacaccatatagcatggttccgccccaggtgagaatgcattctcaaaacatctacatcttatctgcagttatgcataattagggattaaaaagccatacacaggagaatcacactatttaacattttcctgccccaggagagtatgtaatatcaaaacatctacaaccatatctgcagttatgcagaagtagggatactaaggacaggtggcaaggaaatctagttaacaactgacatctacaattaaaaaaaaatctatgaaatactagaaaaactaaactaaagagcacaagacccacgaatggggaaaactattggttatgtcagtgtggatcattgaaggggccatctttctttaaggattgatgtttacacttccgcatgaagggctggtcataatcgaagtatgccgaccagtagttttggatttgggcagaccaatttcaaccaaggctttattttgccattgtaatgtttgacccccccccccctaatttttttt

SEQ ID NO: 40309 - DNA, 388 bp, Oryza sativa
  Clone ID: uC-osroM202027c08a1
ggattacgtaacaatacgctatgcccaagacaagtcaatactacaaaatgtgtggcgagtccagagggacaaaagtcaggcaccgtaagcctttcgattaaaaaccaaactgaaacacgcacgattttttaacaccccacgaaaaacaatctgatagctagctcctttggtggcggaacctaaagagctttatttttccaaaacatccacataattatctgtcatgactatatagtttcgatacgccaaaaggcagcgttcactcatggatatgtcgacatgtcttcctttcatttaagcccggccaagatgcttcaagccttgttggcaatgtttgtggaaagccagtaagccccttatacaaacccttacaaaggtagcacatgtg

SEQ ID NO: 40310 - DNA, 292 bp, Oryza sativa
  Clone ID: uC-osroM202027c09a1
ggggcaaaaaccaccacattggcggtttttctaaagatcatagcaactttttttacaaaggaaaagggtttggttttccctaaagaaacacccgggcaaaaacatttggggggaaaatgatgaaaagggcaagaaagaaatttagaggtactaagcccaatagtaaccccccttgagaaggccccaaaaagggacaatgggattatcaccatcaacttcaacttaaattttatccccccttttttgtccgggccataaaaagcccagaaagggccccgtttcttggcggggc

SEQ ID NO: 40311 - DNA, 362 bp, Oryza sativa
  Clone ID: uC-osroM202027c11a1
gatgttcaagtagatggtcatcgtgcttattcaactatcaacatgtgcacaggtatcttacaatataaataattgtacaccaaaaagaatgccttcatcgagcaccggaggtcaaacaggaagctacaaaaagcagcagcagtgtcgatgcagaaggaaaatatgatgattctgaaacgtaattcacatctacaacctcacgcgaagcaaaataaattgccccaacttgcttcgaatatctggtgatattttattgtttacacgaatgtgatccttaatttacagcacttcacctagcttcattttttaggttgcggaatccggttgtgaggtcatcatacaattttctggaattttgcgac

SEQ ID NO: 40312 - DNA, 258 bp, Oryza sativa
  Clone ID: uC-osroM202027c12a1
atgacacacagaaagtactcatctttgacatttgcagcagagttgcacaagggcagtatcaaacatgggcagggagttgcacaaggtaaaggttgcacgaacagcagtatgcacagcaagatcgtcatcctgcaggatgttggtttttcagaagcacatttatcattgtttctaccttggctccactggtgagaggaccttcactttaacccaccagagcggtagacaatctgggcgttgctgcatccggcgaaatgg

SEQ ID NO: 40313 - DNA, 469 bp, Oryza sativa
  Clone ID: uC-osroM202027d01a1
ggcgctgcaagcaccacaataattaaatttctcacgcaattcatagttgtcatagagctcccaacgcagttcttcaattgaaaaagactgcccaaacagaccaagggtatcatcatagcagcaaagttttttaacacgcaacatcaaagagacactaatgcaataagataacttgaagcgcggatcactagcaaatttcgcgcttagtcgacctcctcgatcttggggccagcaccgctgccgcctgccgggggagcatcgtcctcgtccatgccgccggccatgtccgcgccagcgccctggtacatcttggcgatgatggggttgcagatgccctccagctccttcatcttgtcatcgaactcatcagcctcggcgagctggttgccgtccagccactggatggcctgatcgatggcatcctcgatcttctttttgtccgctgccgggagcttcgaggcgatcttct

SEQ ID NO: 40314 - DNA, 450 bp, Oryza sativa
  Clone ID: uC-osroM202027d02a1
gaaagcagcgcgtgtttattgcatttaataacccttactaaagtcgacgatatgctctaaaggtttcccttctaagtgccgggtcaaattttcactgaagactttcaggactgattttgggtagcttggggccgaggtgtggcccgttatgaagacattcttcgtagtccaataagggtgcgtctggggcaagggctccgtctgaaacacgtcgagcacggccgctttcaggcgatcgccgtttaaggcggaaatgagggcatcgtcatcgacggcttggccacggccaacgttgattaagacacaatttgccggaagatactcgagaaactctttgcttatgattttgtgagtatttggcgtatttggaagagtcgacacaacgtagtcgaggccttggcagaagtctttggcgttttctattgtgaagtttgcatcgaccaagggact

SEQ ID NO: 40315 - DNA, 408 bp, Oryza sativa
  unsure (1)..(408): unsure at all n locations
  Clone ID: uC-osroM202027d04a1
aatgctcaagaataatcatcattttgcacagcatgtttgacgaacaccacaaacagctgctggcaggcaaataaaaagaattgccttgagaatgtatgctgaaagaggaaagcctagtgtacaacctctactctcgaaaacacaaactgacacagtacacaattcacagcctacatgtatactcctgctgtcacaccgtgaacactgtaaattcagctaccagcatgaacttcatcacctggaccagtgagcgtaatattgcaatttgaggcaaatttacgagcaagcatgattgctgcgttcctatccctgtccgtttcaaaagctaaggtgtaggacaggcctttccttgcctgccagaaaactgccgtagctgcagcattacccccaccacggnttccacacaac

SEQ ID NO: 40316 - DNA, 304 bp, Oryza sativa
  Clone ID: uC-osroM202027d05a1
gggacccaaacaaaaaacccttctttattaaaacccaaaacattctttaaaagagtagtaaaaaaagaccatagagcagcagcagattaaagccttgaaattttcaaagcagccaagagaagaaaaaaggtgaagactttttggggccaaccacagtttaggtcaaagctcactttcccatgggggggggttcgttcaatcctggaacatgggcccggggggggggcaggggatctgccatggccggagcaacgggtcgctgggggggcactcccccgggatgtccagggggacccccctaaac

SEQ ID NO: 40317 - DNA, 419 bp, Oryza sativa
  Clone ID: uC-osroM202027d06a1
gaacccaataggaaattctatcagattagcagtagcaccatgaattccatttgatagacagtgttgcatcaactgctacaagaagacatccagatacatcctatacggatctatcataaatatctgtgaacaatcaagcattacaattcaaagaacgcagccgactcaatgagtggcacaccatgagatcagtatgatttctatcttcaaaacattgtgccacctagctctgcctctggatatgcagcgagagtttcttaactttgcagctcatctttcttagctcattgtttccgtttgcttgctatctttgtggcttctcttccgcttcctaactctctttcgctttgcctccccatcagctttgggcccctgattttgagcagctgacattggggctttggtttttttttttacag

SEQ ID NO: 40318 - DNA, 379 bp, Oryza sativa
  Clone ID: uC-osroM202027d07a1
agaagaaagttatttcatcataggcgtcactttgtaaacacttcaaaattggtttttaatgcgaatttctttctatcagcctggcactattatcgaacgtcagaacagacactcgtttgatattgcaggaagccaaatgaaatccagtcggacaacaacagagagtaactatcgagagatcatgatgtcacatatcaaaaaccgtttcaagtcggtacacattgcaagaaatgccaacacctatccaacaaaatacagacgactgccaatttgatgaaacacagagtatatcacaaactgtaatatgttgggcttgctatccccaatctatggacatcactaaactcgtagattctgagccttctgaaatgcttcctgc

SEQ ID NO: 40319 - DNA, 395 bp, Oryza sativa
  Clone ID: uC-osroM202027d08a1
gatcaaatcaagatgctttcaaattccaattcagaaaatagagatgtgtacaggggaagggggaatggagcatactgcatacacaccatcaagctagacaaactgacagaacctaacagacacgcatgaaacttataggaagctagctaaactctaccggtagctgcacatcgatccaacattttcgtcatcatcattggcaaacacgcatagacccacttctttattgtaaccaactgactagcttcatcgcgttctttatctgcatattttttattcttcagtaactcaaaagtttggtccagcagcgaggatcttgtctgtcaggctgctgtctcccccgatcttgtagttggcgaacacctcgaagtttttcttgaacaggccagccagct

SEQ ID NO: 40320 - DNA, 596 bp, Oryza sativa
  Clone ID: uC-osroM202027d09a1
aacactatagaaaaaaaatccaaatcacatacacacatacataaactagaaataccactaaaaaaaacaaccttaatatttttttattatttaaatttttttatattttattttttattttatttatatttttttttttttaaaatgaaccaaaaaaaatttaaaaaaaggaacaacaatttaaaaaaaaaaggcctttttaaaaaaaatcaaaatccaaaaaaaaaacccaaaaattaaattgaaaaaaataaaaaaaaccaaatcaaaaaatttaaaaaaaaataaaaaaaattaaacaaaaaacaaaccaaaatttggggaaaaacaaaaatgtttaaactaaaaaattaaaaacaaaaaaaaaataaaaaattaaaaaaaaaaaatcttaacaaaaaaaaaaccctaaaaaataaaaaaccccgaaaaaagttaaaaaaccaaaaaaaaaaataaaagaaaaataaataaaaagggaccccctaaaaaaaaaaaaaaaaaaacccaaaaaaaaataaaaataaaaaaaaaaaaaaaaaaacccaaaataaaaaaactttccacacttttaaaaaaaaaaattttaccaagag

SEQ ID NO: 40321 - DNA, 319 bp, Oryza sativa
  Clone ID: uC-osroM202027d10a1
ggttgatcccaaatgttctcattgattgatagcgatatcatagaagcagcgacacgaattaagatttaaaaccaaccccaagaaggatcgcagatccaactccaccgaatcgatccaagaactccgcctaatccaaccaaaccatgggcgatctcatctcaccaacacgacacgaactcataaaaagactaacaccaccaccaccttcttcttatttagggactcgacgactcaagacgactgatactggcgaaaggcgaaggggaacaggccatatctaggagagctggccgcagtcggggatgacgaccggcttggc

SEQ ID NO: 40322 - DNA, 196 bp, Oryza sativa
  Clone ID: uC-osroM202027d11a1
aaagaaggaattttatttaggggccaggcggcaacatgacatacatgaaacgctaaggaagctagctagctagctagcaacaaattaaggacttgcatgcaagctaggtagctagtacatggcatatgtagggggactgggagctcgttgatgaagggaaaaattggatggaaaaaagttttcttctaaatgcaat

SEQ ID NO: 40323 - DNA, 317 bp, Oryza sativa
  Clone ID: uC-osroM202027d12a1
aatccttctttgtacaccgggagaccgggaataagtggcaatcttcagctaaaccattcttacacaacaaaagttgctctaatagctcaaaatgaactgaactggtattctaatggttacaacgttttaatacttttgaatcgtacaagcaccatactaatgggttcatcatgtcacctttcatccctgctgccctgcaatacagctatttttgctggttcaccgggaggtagactccttcagctgcaagccagacattgtcaggacgtttgttgccaacaccacataccttttgctgtccaccagcaatgcgggtg

SEQ ID NO: 40324 - DNA, 383 bp, Oryza sativa
  Clone ID: uC-osroM202027e01a1
gaaaaagaatataaaaatcccactaattaattacaccgagaatgagagatccaccactagactatcaaaagggaggaggaggagatccaagaaggagaaggaacaccatggcgacgaagagatctctgcataagctcagaagagcttgtaggcggaggaggcgtccagagggtggatgaggtaggtgagcaccagcgccacgatcatcagcaggtatgcgatcccttgatccaccgacgtcccgtcgctggtgggagacggcgcgggcgcctgtgcagccgcggcgatggcgaaagagaggatggcgacgacgatggcggcgaacgggatcctcgccatggcgaacgaatctgagatgatttttgcagatgctgatatttccc

SEQ ID NO: 40325 - DNA, 423 bp, Oryza sativa
  Clone ID: uC-osroM202027e02a1
aagcatccaaacatcagtcgacatgctgcagaataacacataattcggttcacttttaaactaaacaggaggttttatgtcatcttaacaaactactaactactacagagatccggtttaacaactggagaggcaaggggttacatcccttataggcatatcaaaagtctaccgcttactgaatgaacatcccaaggggattcaaccgcctacttcatataagcgggagcatcatgaggcaaaacatagtcttcaactagatcattgctgtcaataatgaggtacaaacctcaagcggtccattgtccaccatatccagcaggctgcggtgacaccccctttgcaacagcaggctgtgggtttgcaggaggtgcaccatagccactctgagctggtggctgggcagactgatcataagctggt

SEQ ID NO: 40326 - DNA, 461 bp, Oryza sativa
  Clone ID: uC-osroM202027e03a1
aaaaaaatagctgtatattgttgggaaattcagaaattgtcatcgtccagtagccagccacaggagggcaacggcttagaccgagggcatcgtcctcagccaagcagcaccctattgcactgaaaataaatataaccagagggctttgccgtgtttcaagtacgattagtttcaacacaaaggcatggcagatggaaccaatattgaacacaaactcggagggcgagctaacgaaggacacaacagacaacctaactatataaatcgtcatcatcagcgacggcggcagcagacgcaaaaggatcagccgcagctccagcaccagcttctgtccgctcgaaacggaactcactgccaaacccgcgagactgctgcaacgtctgggcgaacgcctggtacttgcggatgtcggcatcgctgacactgcggcgcgcgtacttatcgactcctcgaagtgggct

SEQ ID NO: 40327 - DNA, 402 bp, Oryza sativa
  Clone ID: uC-osroM202027e04a1
gaatgggaatcagagtaaaattgctaccattacagagagcatctatttctcaatagtacaacacgctagttcaggacgaaatacaacatgaatatttatgcctcccaatacagattatatggaaccgaatgacagccaaagaccaattgttaaattatcctgaatttacatacaacaacagagctagaccacgaaccgaaactatcctcacggggagtaatttacatctgagaagcagccttggcttgacgcttccaagcagcatcagttcctggttgacaaacatgggacctaaaggtggttgcaagttacttccttcactgctcaccatgaggtgtaggcatatatattagctaacgactgcagcaccaaataaaatccacctagcaacagttgcatgaa

SEQ ID NO: 40328 - DNA, 237 bp, Oryza sativa
  Clone ID: uC-osroM202027e05a1
tcgcggccgcgcccgcgccggcggcgtcgttccggaggcgggacaggtggttccacctgccgctccacgcgccgccgccgccggcgtcggccgagcatctgccggagccgtcccccggggagccgctcgtggtggatgtctacctgaccccgtcgggcggcggtgggggagctgaggcggtggtggagaggtggacggtgtcgtgcgagccgtggtcggccggggcgaggggcggcg

SEQ ID NO: 40329 - DNA, 415 bp, Oryza sativa
  Clone ID: uC-osroM202027e06a1
ttttgtttttttttttttttttttttttttttttttttttttttttttttttttttttagggggtcaaaaaccaaaacccccgtttacatgggtaaaaaaaagattgttattacatttgggccttccacaataatgataactaccctggtgcctcgatctcatgggatcctggcacaaaaaccgcattaatgggttctaatggcaaaaaaaaatttacagggtgaactgaaatacagattccacgtttgtcccgtcccgcttaagattaacatagtccaacctggcattttttatggaggtgtttttttctccgtttccacagttcccttggggggaaactaaaacatttttaacagttacaagacagcaggctcaataagggcggtttcgccaatcaacccttgatctggtact

SEQ ID NO: 40330 - DNA, 343 bp, Oryza sativa
  Clone ID: uC-osroM202027e07a1
ctaaaagaagcatcagccgttaaaaactccacaaacaatccccaaacatggccagaggctttgcttatgttcagcgtctgacttgtgaaaacgcccaggattcccaaactacagcggcaaatccatctaattaaacatcaagactcgtctcaacaacaacctgccacaattcacaaacagcaggctgctgcacaagacggtgtacacggttcattttatttgggtgtttgtttccaccatcagattgatataatacacgcgaacaagcaaaaacattcggcaacaatttttccaggaaaattggggcctattttgtcatcatcccgaacgagcgttatttgga

SEQ ID NO: 40331 - DNA, 440 bp, Oryza sativa
  Clone ID: uC-osroM202027e08a1
ggttcatgccaaaatttatactccggcatcatgccacagaaaatgtactctcttttttctagtttggagggacaactccagaggtcacagttattaaaatccatagttacaaccaggtccaaccggaacgcagcacaccgaaaggctgcaacaatctcaccttctgttcttgagatttctttaaccaattcatggcagcttccagtaagcatcaaggcatcaaccactgattctaccagtatgcttcaatggctgtagcgatcaattcatggttcattccagccacagatcatagcagattttgtcacccccagaaactcagatatggtttcttgaaggagatcctcatgtaccattttcccgacctcactagcaacaagatcgatgccatctttagaaccaacccaccccaagtccatgaataggcccttatgagcata

SEQ ID NO: 40332 - DNA, 457 bp, Oryza sativa
  Clone ID: uC-osroM202027e09a1
aaggatggaatcgagtagcaatactttcaccccaaaatacagtttagcgacaatatcttagaaaagccgcttgctttgccgccatggctggcaagctgagcagagcagctaacacaaagaacacgagatcactataaaccaaacggcaacgaacgaagaaaatacagggtcttttttgtctgaagatacacgaagcggctcgttttcttttatttttagtctcctctcctcctcgatgatgggtgtatggcaatggcaatggcgatgggatcttggcttagttgatgggaaggggctcgccgttccactccttgaggcagtcgagcatggggtcgatgagcttgccctggctgatgccgaggaacaccttgttgcactcctcgccgggggacttgagcttctcgccggtgaggaatacgcaagcgagcttctcgcggacgaagcggtagagcgggaa

SEQ ID NO: 40333 - DNA, 412 bp, Oryza sativa
  Clone ID: uC-osroM202027e10a1
gtcaatcaactagaaataaatatataaatatatattattatatctctctctcacacacacacacacccctgtttagaagaaatataaatggtgcacatgtagagttaaggcaaatttcacaggatgttaaaagccagctactcatgttttaaaggaactggcaatgagacctgactgttatatttacatgataatcatatatacaaattttctaaaccgaaccaatcatatgaacaacagactgtttaattgatggtaactattttcacaaggattagctgcagagcaggatgaggctgatgaacagccaacaagctaaagggcgcgcaatgcaatcaatttgaaagttaacgttagaagagtgcatttggagagaaaaggagatgaaatggcgttgcaatttggacctaac

SEQ ID NO: 40334 - DNA, 415 bp, Oryza sativa
  Clone ID: uC-osroM202027e11a1
ttttttttatattttttttttttttttatttttttttttttattatttttttttttttttataatttttatattttttttttttgaaaaaaaaaaaaaaattaaaaaactcgtaaaaaaaaaaaacaaaacctaaaaaaaaccactgaaggaaacccaaaaaaacaaaaaaaaaaaaaaaaaaaaaaaaaacttaaaaaaaaaaaaaaaaaaaaggaaagaaaaagttgggcgggaaaaaaaaaatttaaaaaaaccctggggaaaaaaaacgggaaaaaaaaaagtttggaaaaaaaagggggcaaaaaattaaacaaaaacccttaaaaaaaactttcgggaaaaaaaaaacttttaaaaaaaccaaaaaaagggaaaaaatcctcaaaaaaaaaagaaaaacccttttttcc

SEQ ID NO: 40335 - DNA, 180 bp, Oryza sativa
  Clone ID: uC-osroM202027e12a1
tgggcggccggcctttcttttgtttggttttactctaatgctgcaagaattacaattattttgaacaggatgtttgtcaaacaccacaaacagctggtggcaggcaaataaaaagaattgccttgagaatgtatgctgaaagaggacaacattagagcacgaacgcttaaagtgtaaaac

SEQ ID NO: 40336 - DNA, 343 bp, Oryza sativa
  Clone ID: uC-osroM202027f01a1
ccccacaaaaaaatgtaaacaaggggaagaagcccgggggggcccctggggggggggggaaaacggggcacccccagcgaaaggggggggggacccccttggtttgttaccccccccctggtctgggaaggggcccggaccatggccccggggaggagggcggacctttccctgggggttatgggggggcccccaaaacccagctggcccctggggggtttttggggggagggggcccccccggggggggaattgccccccctgaaagggaaccccctgggccactggttaaagaaggggaaccctcaccgtgggcgggggtttaaaaaaaaaaagtgggggc

SEQ ID NO: 40337 - DNA, 429 bp, Oryza sativa
  Clone ID: uC-osroM202027f02a1
agaattataattcgcctgcatatccatctcacccaccgtccataaaaaaaacaacaaagaaaaagctgcatttgaaaaaaaaaagaaactatatataataacaatatctccacggtccgatccgaaccgtccgttctcgatccgacggctcacacgcatcgcgccaccgcctccattggtgcatgatcccaaaggtgcactcatcatcctacttatccttgatcatcacaaaagacatgtgaattcaagaagacgatgacggcagcaatggtggtgtcatatgtgaagaagaagatgaagaagatgaagaagacgacgatggcaatggtgtcatcacggtgtccatgtgcgcggcgaatgcgaaagcgaagctcatctctcatcaagggcagaacggcgtgccgtcctttgcgcggtggctggggatga

SEQ ID NO: 40338 - DNA, 440 bp, Oryza sativa
  Clone ID: uC-osroM202027f03a1
ggaaccaagaaatgatgcccattcacacctccatttggctccaggccagggaaggggataaaaaatacatcgctttgaatgacagtcggtcagaagagaactcaacaaccgaaggcgcaaggccgatatcctatgtagttgtagtagtagtcataacatagaagaaaaatccaacgggagtgccacgttttaatgtttgatcaatcacaagggagttcagaactttaagaggtgagtcatcacattctcctgcgaaattccacagtagaatagctggacactagttcgtcattatcgtcattaaatgttcttcgtcgctcctatatgtaatgaccacttgaccaggtcaacttgttgctcattctgccttccgagcctttggcttcactggcctggctggcttgataacataacccagcaagacaactacaatgggaaca

SEQ ID NO: 40339 - DNA, 318 bp, Oryza sativa
  Clone ID: uC-osroM202027f04a1
ttttttgtttttgaaaattaaagagtttctttattgattattacaataaacgcagtaatgtaccactattctaccacttgcatttagaaaccacaccagagagtacttgatttgccagagcactaatccttcatctatagagtcattacagtctgacagcagcatgactctcttatcaccacgagtccatgacctaacactatgcataatcaacactaaaccaccatgaacatttatctaaagtctaaacagcaactttcctaatccatttccagtgatgatgagatgacatgggcaaagaaccaggaacagagagag

SEQ ID NO: 40340 - DNA, 354 bp, Oryza sativa
  Clone ID: uC-osroM202027f05a1
agagacacaaaaaccaccgttagtatttccagactaattatagacggagggggcagacagcaagcccacgctccgatgctccccaagaccactaatgaagaccgcacgatactaggacaggaacacccggcaggcaagccatgagcccaacacactattttacgatactcgaatgatgggcaccaggcccacacacgcacagcacaactgtgtgtccacctttaatgccaaatggcatacctgcactatggcttccatcagtggctcaccctactgaacaggcactgggcacatgagccggtgcgccaactaagacgtgctggacagggttatgagcccatcgaaccctggagg

SEQ ID NO: 40341 - DNA, 470 bp, Oryza sativa
  Clone ID: uC-osroM202027f06a1
gaaggcaaaggaaatttcccgcaaatacttattcatatgttttgacaacatttctcccgacgcatgctcattgtggcagacgcagctgaccacctagagcttttagttcaccattattatttagaccaagcatacgtcccaagatcagaacacatgcttacaagcgaaaatactaatagcctggctggctgcttcacagaataaccaaacgacaacctcaacagataaaaatgccacggaatgaaaacaaagcagcgaatcgtcaccagaagtcccatcttactcatcaaacactccatcattctcctccaacgcatcctctccccaggggagaagattgcccagtttaccttccttaacaggagcagggttcaccatattctcagcctcgaagcagtgcagaacagatttgggcgacccaacagcaacaggtacgtcttcagtagcgtcgaagctctggtagatgagga

SEQ ID NO: 40342 - DNA, 219 bp, Oryza sativa
  Clone ID: uC-osroM202027f07a1
aaataatataacgtgataaaaacaataaagttagttagactttattcttttatcggattaaaattaataaaaagaactaccaatttattaaattttaatcaggaaaaatcttattaaatctagcaggtttaataagacccaaaggttgctatattatggtttttttatttttttttgtcaatgatttttatataatatattatatatacatgaatatta

SEQ ID NO: 40343 - DNA, 369 bp, Oryza sativa
  Clone ID: uC-osroM202027f08a1
gaataaatacgatttttaattgatttttacgttttttctttgttttgatctacaattaaatttgttatcactacaaataaacctgatcttgaactatataaaaacccttggaatacatttttttctatgagagcacttaacgatgacgacgacgacgttatcaacaacaatttctttttgactaaatcctatataaccaactgctttggctctggctcctcattgatcaactaaactctaaaacttaacaaaaatattaagcgtttaagatttctttttttgtagtctacttttaggcgattcaattttcaagtcaattgtctttgttttgttattttgaatggattttcggtttttttttgtttggtt

SEQ ID NO: 40344 - DNA, 288 bp, Oryza sativa
  Clone ID: uC-osroM202027f09a1
ggccgaaccagtcgtcgaacccctgcacgcacccgatgaagcggccgtcctccttgtgggacacgatggaggcgccgcggtggtgcacccgggcggggtaccggcggccgtaccccaccatgtagctcagccgcagcgggttccgccccaggatgtagtccgcctgcgacctcgccagcgacaccatctccgccgccgtcgccgcgccgccggggcagcggagggccgcggaggcggaggcggaggaggaggagaggtagtgggagtaggcggtgaagattctggtgc

SEQ ID NO: 40345 - DNA, 152 bp, Oryza sativa
  Clone ID: uC-osroM202027f10a1
gcttaaacacctttctaagttctaaccaaacaaaattcaaatgtgtttttatttgaacacacaaacacatcgcttcaaacaaacttagtttgaacggtaacacattccgttctcgcaaacatttgggtggttctgcccaacaaatccccaaa

SEQ ID NO: 40346 - DNA, 345 bp, Oryza sativa
  Clone ID: uC-osroM202027f11a1
ggcttaaacacctttctaagttctaaccaaacaaaattcaaatgtgtttttatttgaacacacaaacacatcgcttcaaacaaacttagtttgaacggaaacacaatccgttctcgcaaacatttgggtggttctgcccagcaaatccccaaattacagtagcttctacatagacacatctgctgcacgtcactggcacagtggctacaatctaggacttgtacgtgtgtgccacgtacgagaacgatgatacttactagttcatacgagcccgacacgttacgagacgcgtggcatggcggtgtatcgatgacgtgtacatgtgctttgacccgccgggtcaat

SEQ ID NO: 40347 - DNA, 468 bp, Oryza sativa
  Clone ID: uC-osroM202027f12a1
cgtagaatgattggtccatattttattttggatcgggctgcaaaagccaaataagtccccccttgacatttacatcaagtacacaaccaaaagaaaacgtgcgagcaaaaaaaagtctccagaattcactagcatcggcgaacgtactagttaaacatattcaccatctcatcatggaaggagttattgatgattgattgattgcacctgctggaagcattcttgtggacaatctagcctgtgttctgcatgccggcagcaatgcccttcatcgtcaggatgagggtgtcctccaggccaggtgcgtactcgctcgcagcgttcagttggaccagctcggcaggctggttgctgtcgacgaactcctttgacaaggccggctgcgacatcacctcgaagctagggtcccttattcgcttcagggtgtaggccttgcaaacgttcaaggtagtgatgtacgactcacgc

SEQ ID NO: 40348 - DNA, 452 bp, Oryza sativa
  Clone ID: uC-osroM202027g01a1
aagctgaagacattgtcttataggatcaaaacatttgtattaccacaactttttaaggatggaatcgagtagcattactttcaccccaaaatacagtttagcgacaatatcttagaaaagccgcttgctttgccgccatggctggcaagctgagcagagcagctaacacaaagaacacgagatcactataaaccaaacggcaacgaacgaagaaaatacagggtcttttttgtctgaagatacacgaagcggttcgttttcttttatttttagtctcctctcctcctcgatgatgggtgtatggcaatggcaatggcgatgggatcttggcttagttgatgggaaggggctcgccgttccactccttgaggcagtcgagcatggggtcgatgagcttgccctggctgatgccgaggaacaccttgttgcactccttgccgggggacttgagc

SEQ ID NO: 40349 - DNA, 298 bp, Oryza sativa
  Clone ID: uC-osroM202027g02a1
gcctccgaggtggaggcgccgaaggaggagacgccggcggtctccggccgaggctgtggcctaggaggcggcgcccgcctaggccgaggtggcggagaccaaggaggcggatccagctgcggccgagccggcggcggaggaggttaaggaggccgagcccgagccggccgagccggaggccgagcctgccaaggaggaggtggcgccagagcccgccgccgtcgccgaggcggaggccaaggaggccgagccggcgggcgcaggtggccgaggaggtgaaggaggaggaggcggcgcc

SEQ ID NO: 40350 - DNA, 268 bp, Oryza sativa
  Clone ID: uC-osroM202027g03a1
tttttgtttaagaattaagatctgcatcacataaaaacatacagtgactgagtactggattacacgattgagttgttcagggttcagataggaaaaacatcttggggactagagatagagggaatcgacagatgcgcagcagtagcgcgcgggaaacaggacatcatcgattgcgttgcatgtcgtcggctgcgcaagcggcggctgcggggtcttaagacctgctctttgaatgggattcgccctgatgatcacctggtggtagatg

SEQ ID NO: 40351 - DNA, 325 bp, Oryza sativa
  Clone ID: uC-osroM202027g04a1
aaaccaacagtacgttttataacaacttttattcacggtttgatatatgtagatagatacagcaatcattagtggacatgaactgtttcggccacgattaatgaatggggtgatagaaatcgaacatgcatgcagcatgtgtacatacagttaattaaacaagccaaattaagcatacatacatgggcgcaggaattgaagaaatgaagcagtgtaatactaggatggatggatcagtcccagatcatgacgacagccatgacggcgacgccgaggaggacggcgaggaacttgaagagcggcttgtccgcggcggtggggtggt

SEQ ID NO: 40352 - DNA, 333 bp, Oryza sativa
  Clone ID: uC-osroM202027g05a1
cccaagaacaaagctggtaacaccaaatttcacaaatacatttcaaacagattaacagatcaacaatgacatagcttccaaaaggaaataaggcaaaaaaaaattaactctcacaagttaaaaatgaaatagagaacacatgttacgcaaggagggagcacatgcacaaatgaagaatagacttggacgactcccatccacagtgtcctgatttacaaggtactccagcaacgattagaatccaatctttacattagggattttctttactctctgggcgcccgtgttcctgcaccaactctccagatccggacattcacttaatgtcagata

SEQ ID NO: 40353 - DNA, 126 bp, Oryza sativa
  Clone ID: uC-osroM202027g06a1
tttttgttttttttttttttggggccaaactttgaattattacagttcatggataatacagttgcagcaacattattcgagcagtacagaacctcaaacaatttcattttcgtgctgcctaatcgc

SEQ ID NO: 40354 - DNA, 244 bp, Oryza sativa
  Clone ID: uC-osroM202027g07a1
ttctattgaccgcccttcctttttttttttgcgacatcaaccacagcttttatacaaaaccaggaggattaaacgtacgccacaacacatagtaaaagagcttagtagaacatcattatccacgaaaatgtcgttacatgcatacatttaaaacaccatttttctgctgccataagcgccccactcttacttattcagcttaggacttcaagcccaaggctatcttttaccttcaggccgcggt

SEQ ID NO: 40355 - DNA, 303 bp, Oryza sativa
  Clone ID: uC-osroM202027g09a1
ttttttttttttttttttttttttttttttttttttttttttttttttttttttttttttttttttgggaccaattaacgtagggtttagttaacaaggaccccctgttttattgtttttacgaaattgtttagaaaaacagggggggccctacctacttttactatttattatgaccccaacttttttttttttgcaaacccactaccctttttaacattttgatttattaaaaattcctaccctggtttcacaaaataatgtcttaaacttggggaaccccttaacttgggggtgcttttg

SEQ ID NO: 40356 - DNA, 235 bp, Oryza sativa
  Clone ID: uC-osroM202027g10a1
gaagcttcagtagctaagatacacatttcagtatggaagaaagtacacatatgaactgctcatataacaccaggaaagctgatcgaatccccagactttgattgatgtatgtaagttctttattcagatcaagcgactacatgatggcaagtgcgaccaacatgaagaaatgcactcgggacgccattctctccaagccccctaaaccatggaagcacaatttgcacaatgctgg

SEQ ID NO: 40357 - DNA, 257 bp, Oryza sativa
  Clone ID: uC-osroM202027g11a1
caacaaacgccatactctctgccttaaagatccaacaggttcaaagaacacgcaagctcagaactacacatcaccaaaattggagcaagtttgggggtacatatccgctcatacagtggaggatttatttctcgatcctacgagctttttaactagagttcgaccgggaagtcaattacggatagaaatgagcattctgtctttacaaaacccatgcgacacaacagtgggcattaaccgcatgattttcaccatta

SEQ ID NO: 40358 - DNA, 249 bp, Oryza sativa
  Clone ID: uC-osroM202027g12a1
tgctttcccctccctgccccaaatgctcccggccacctccaccgtcccacccacctcgccccttccccactcccgcgctgccccgcgccgccacctccgcgcagggcttctccacgggtccgtggcgacggcggcggtggttcgggcgtgcggggtgacgacgggccaccgtcggaggatgggctcggttcgggcgagccccagggcaggcggatgggaggtggcgatggcggataaggagggggtagg

SEQ ID NO: 40359 - DNA, 285 bp, Oryza sativa
  Clone ID: uC-osroM202027h01a1
tttttgtttttttttttttttttttttttttttttagcaatcaaaaccagtacaagaatccaatacactccccaaacatatgcgatagcatacgaatccaaacatggtctggtaggtgaaacggattaaaggggcagtagcatcagcggggctacggaccacacagcattgtactactactacattacccaaaagcacataaccaattaagcatcatcataccgaaacaataattaagattgcccaaacggttggacacaacaggcgacactcaagatgggatcc

SEQ ID NO: 40360 - DNA, 537 bp, Oryza sativa
  Clone ID: uC-osroM202027h02a1
aaaggcccggcaaaaagaatgaagtatatgaatatatgaccatatgactacatcaataatcaagccacaacaacgcagttcctgtcactaagccctccatttcactgtctctcatacatgacaaaatcaagaaccctctttgagtttggtggataaggccaccaaccaaggcacagagaattcagaactagaaacaaacattaacattattgcgtaattacgttacaaacttacagatgtagtttattctaacaatacgatctttctttgttttgttttacaccaacaacagcacacattccctcagagagaaaggcaacacctcacactgacaatttctgaaacaaaatggactcaagctgggaacagcgcaaatagttgtctgaattatgcttcagccatgatgcaatcaatggcttgcttgcagattccagtcattgttgcctctggtccatatacctcaattggaacaccaagttctgcacctagtgtacgcattttggcaaggccagttggtagttttgaccaccttttcga

SEQ ID NO: 40361 - DNA, 454 bp, Oryza sativa
  Clone ID: uC-osroM202027h03a1
ttttgtgatttttaaaccaacatgacgttttataacaacttttattcacggtttgatatatgtagatagatacagcaatcattagtggacatgaactgtttcggccacgattaatgaatggggtgatagaaatcgaacatgcatgcagcatgtgtacatacagttaattaaacaagccaaattaagcatacatacatgggcgcaggaattgaagaaatgaagcagtgtaatactaggatggatggatcagtcccagatcatgacgacagccatgacggcgacgccgaggaggacggcgaggaacttgaagagcggcttgtcggcggcggtggggtggtgggggcggtagcccttggcgatgaggtggttgatggcgacgtagatgaagacgccggtggcgaggcccatggagatggcgtaggtccagtcggcggcgcggccctgggaggtggcg

SEQ ID NO: 40362 - DNA, 134 bp, Oryza sativa
  Clone ID: uC-osroM202027h04a1
tgttgtttttttaaaccaacggttcgatttataacctcaagaaggcacggcctggtaaatgatgatagaaacaacaatgattcaggcacatgaacatgtttaagccacgaataatgaagggggagaaatgaaat

SEQ ID NO: 40363 - DNA, 358 bp, Oryza sativa
  Clone ID: uC-osroM202027h05a1
aaaactaaaatcagattgtcatagcattcttcatttactcgccctatttgcaacttccgactctgaagaaaaacactgaaaatgcaggttgcttagcctgctacatctgcatccttctcaatcaccgtctgcttagcgacaacaaaagagcaagggcacagacgcagcagctggcatagatacacacaaaacacacacgagttttacaggacaagcctattttagaaattttacatgtactctctcttattgatccaaagggtttgttcatctatctccttcttgtacgctaccttatgctgctgtcagcttcttctttttctttttctttttcagtaactggtgacgatgagcagcc

SEQ ID NO: 40364 - DNA, 404 bp, Oryza sativa
  Clone ID: uC-osroM202027h06a1
gcacgaactataatgagatgttttgacattaaaaagaatgttcagcgggtgatgtcaagcaactctgaatgaaacatacaaactgcgacctgatattctgcgagacttaagccctatcacatatttacaaatgaaaaataatttataaataaaacttttatatagatgttcttaacgatctaaaagcaaagactaaaaaataaattttaataaaaataccttaaatcagctttaaatttaaaattgaaagtataaagtataagtgaaaagatagtccgataaagttttacctgtgaaacctgcagctttgagataaagcgtttcaccaccaactatgccccaaggcacccaatccgggccaactttctgtgtgtcgatcagcttttccaaccacaccaagcacc

SEQ ID NO: 40365 - DNA, 181 bp, Oryza sativa
  unsure (1)..(181): unsure at all n locations
  Clone ID: uC-osroM202027h08a1
ctagggtatgcgcatctctatgtgaccgccccgttctttttttttttttttactgtccatgaccttntttnttggagaactccttcaggaaagaaggtgatggacagaaaataaaaaaaaactccccactttttgttcacttgctgctactatacacaacaaaagttcaacccaaaaataa

SEQ ID NO: 40366 - DNA, 336 bp, Oryza sativa
  Clone ID: uC-osroM202027h09a1
ttttgagatagttaagctaacctgcagtggcgactgccatgcgttgcacatctagccgtggcgaaagtggttccaggtcgtttgccggaccaggagggaggagctgaaccccaaccgagatcccaccaggtcaaactccagcaggttgtcctccatcatgtgaccgccgatcaccaccgacgtttccgacgccacgccgtcgtccaccacaccgaggcagagagcgccgcccttggtggccaccatcgagttcgccccgaacaccacccacgacgtggcctcgctctggaacaccagcttgaccgtcggcacggccggtcccacgcgtgtgcccgc

SEQ ID NO: 40367 - DNA, 363 bp, Oryza sativa
  Clone ID: uC-osroM202027h10a1
ggagatgagcaccacgacgcacttgatgctcttgcacaccgtctggatcaccgtcggcccgggctccgggatcgtcaggttcaggttgtcgccgaacccctccgcgtacggcggctcgccgaccaccacgatcgcgtagtcgtacttgtcgccggtgaccacgctgctgtccgggttctccgagtacaccaccgtcgtgctgggatcaacggtggccttgatcgccgacaggatcgtcgtgccagcagtgatgttgttgccgggctgtccttgccaggtgatggtccattcttcacaatgtttgtccaaatcattagcatggctttccgcgacgagaattttaccggctttcttcgggagggg

SEQ ID NO: 40368 - DNA, 294 bp, Oryza sativa
  Clone ID: uC-osroM202027h11a1
aaccatggggaatggagaattttacttgtaaatttatttaattttacacatcccttcttaaaaattccaaatttttcagcgaatttgtattttaattaattacatatttttctgatctgtaaacttcccggggcaacgcacgggcacttttgctaaaccaaacaacacttttggtcaatatacacactttgtaatcacccggtgcaacgcacgggcacttttggtaggatatatatatatgtaaccagtattcaacacgttggacacagggtttcttggtaatttattaagcaa

SEQ ID NO: 40369 - DNA, 297 bp, Oryza sativa
  Clone ID: uC-osroM202027h12a1
gggcaatatcaacagatgatgccatcatagggatgtgataaccgcatatcaaaatatcgatccatgagagtatgtatgtcagttcgaaccacttcactcgcggcagcgaggaagtcgaaaagcttattcacgactcatctagcaaaacttgacgataagcctatctcaagttcttcatacaagcattgacattgcaaagttacaccgagaggtctgaaacaaaagtgcagactgctgatggagacaagccgaattagcttacgcttcattaagggcaagaacacctgggagggtctt

SEQ ID NO: 40370 - DNA, 488 bp, Oryza sativa
  Clone ID: uC-osroM202028a01a1
cacaaactattgactctcgaatctcgatagatttccattttcctgattttcataattcaatccaaggaacagagctcccaatacaggacagtggtatacacacatatttcaatggacaccagcaccagggtcatcttgacaggcactacctctatagcaaaagcaaaaagacaaaactgtaatggaactacacaaggttacgatgaatgcgcgccaaatggatgggtgagagcaactaacgggtgagctcatcgcccaaagcatctcagcacagaggacacaagtgcagatgatagaaacttcattccagcagatcccccggggaagtatgaaatagcataatatgctagcgcaagtacctgaagacaagagaagaaaactgaaagtatgtagctatggagcaccattgacacgtaaatggtagcagccatgctgcccacaaatcccatggtgaaaggtaacctttttttggaaatcatatgatagag

SEQ ID NO: 40371 - DNA, 401 bp, Oryza sativa
  Clone ID: uC-osroM202028a02a1
gcaaacaggtcaacaagacgttgacctcacccacgcattcggaagctaaaaaaactttttacaagcagcaagcaggtcaacaaaaagttgagctgcaaatgctgaagaaatgaagatttctgaactttgtctgaaaaaagggaaaaaactttgaacatttcaaaattcaaactgacggattggcgttcgtcagttggtgccggaagggaagacccacaccggcggcggccacttccagagcaggtcgcgcacggggccccgtggcaccttgtagctcccgtcggggaggtcgagcacgccgacgttgggaaccaccttggggcaccttttgtgcgaccatggcccgtcgtcggtgaagtagacccaattgccctttaccttcgggcagcaatcccccggga

SEQ ID NO: 40372 - DNA, 492 bp, Oryza sativa
  Clone ID: uC-osroM202028a02b1
taccgtctcatcttcttcttcctcctcctctgatcttctcctccttgtcatgcgatcgagatttgctctgctctggcaatggcgatgaacaagctagtcggcgccgcggtgaggcggcctgggtgggccgacctcccgcgggacctcctcgagtccgtgctcggccgcctccccgtgccggaccgcctccgcttccccggcgtgtgcacggcgtggcagtcggctgatgcggcctccgccaccgcacggtttcgcgccgcgcagccgccgtggctcatgcttccgttcaacccgaccgcgcgcaggcagagcccgggcggcggcggtggggatggtaggttcttggaggcgagagttcttgagcctcttcgatggcagggcgtacgccataccgcagccggcgccggcggtgtctgaacggctatgtgttggcttcgtcgaccggtgggttgtcaccgccgacgccggcttcgagctacaccttcttgaccc

SEQ ID NO: 40373 - DNA, 79 bp, Oryza sativa
  Clone ID: uC-osroM202028a03a1
aacaaaaagactgaaaaaagaagtctattacccaaattttcttttctgtgggggaccccggggccaaaaaaacaaaacc

SEQ ID NO: 40374 - DNA, 429 bp, Oryza sativa
  Clone ID: uC-osroM202028a04a1
gtcaagaataacatcagccaagtgtaaaataataatacacaaggaaaagaagagccgcgatgagaaatgtgtacattacaaaggcagctgggttctgcttttaacaaccatgtccgtgccctactgaaatctcagttttctccttatacttcatggttgctaatttacatggataaactctccagctctttgagaaagcggtttcaaagatcatatacattgctaaccaatctatcactcgtgaacaaatatgtttgtagttcaattcgtcaggcttccttacagaacaaaccacaaatcaatttgagagctggaatcttcctgtcggtttcctctttcgccatccaaatattgcatagtaaaagagtgtgagtatcgcaaggaccacaaagccatactggaaaacattgtacttgtagagatacttaa

SEQ ID NO: 40375 - DNA, 469 bp, Oryza sativa
  Clone ID: uC-osroM202028a05a1
gaaaaaaaaagaaaaattgcagattacattacattattattattcattaatgacacctcaaaatacatcgcttgtcgtgttaatcatattacaaaattctatctgaacaaaacaccttaagtacatagtcatattgtacaaattacaaaagtcgatctgctctcgataactttacgagattgattgattcgttcattcacaaggcaattaacacctcaaattttacaacaacaacatcatgagcaatagctgaaactttgaaagcagaactccagtctgtctgtataaccagcagcagcaggcagcaaagcaaactgttcgatcacatctcgacagggaacctcttgtacaggtccgggttgtcgagcctgggcttggcgatgacctgcagcgacgtgctcatgaacgtgacgacgccgttggactccatcatgttgacgtcctccggcctggtgccctcggggagaga

SEQ ID NO: 40376 - DNA, 400 bp, Oryza sativa
  Clone ID: uC-osroM202028a06a1
agcactggaagtactcgtattccacaacaaccgaagggcaacaataagactcagagcatccaagtttttaaccgaatagaaataaacgggttttaaacgactaacatagtgcacattgggagcagatattaacggtccatgcaacgagggccatggccgggggcaaaacttaacgaacgctaagatatctcaaatgcagccagcataaccaccacttcaacgatgctcattttttgttggcgggagccttggacaccttggcaccggttgggtcctttttttccacgttcttgataacaccaacagccaccgtttgcctaatgtcacgcacggcaaaacgaccaagaagagggtactcaaagaaggtctccacaaccatgggcttggggggaaaaatttt

SEQ ID NO: 40377 - DNA, 485 bp, Oryza sativa
  unsure (1)..(485): unsure at all n locations
  Clone ID: uC-osroM202028a07a1
gcggcgctcggcgccgacgtggcggagctccggctcgaccgcctcgccggcttcgcgccccgccgggacctccccgtcctcctcgcgcagccgcgcccgctccccgccctcgtcacctacaggccgaagtgggaaggaggtgaatatgaaggcgatgacgagccacgattcgaggcgcttctattggcaatggaaatgggggctgaatatgttgatattgagcttaaggtcgctgacaaatttatgaaactcatttctggaaagaaacctgaaacatgtaagcttattgtttcatcccataactttgagaacactccttcaacagaggagctcgaaaatttggtggctcagatacaagcaacaggagctgacatagtgaaaattgcaaccaccgncaccgaaattgttgatgtggcaaaaatgtttcaaatacttgtacattgccaagaaaagcaggtgccaatcattggactggtgatgaatga

SEQ ID NO: 40378 - DNA, 359 bp, Oryza sativa
  Clone ID: uC-osroM202028a07b1
ctcttttgtttttttttttcgaggcaaccaatctccaaacaagctttccttaccgatctttcatgcaaccatctaggggcaaaaaagaaacttgtccaatacaaaaatgcaatacaatttgacaaagtttgagttgaaaccctctcacgatctacccataaatataacggtgaactcaaccagagactcacaaacgagccttgagggctgcgatcccagctgccttcattgcgtcaggattgcccaaggaattacgcagtgctcggaatttacaatcaaccacttactgtatctttggcagaacaatatcacgcatcaagctatctggagcttgcatgcctgttaaatgctcaaattga

SEQ ID NO: 40379 - DNA, 330 bp, Oryza sativa
  Clone ID: uC-osroM202028a08a1
cccctgaaatattggtctcatttaatgacatgctgccaaccctgaaacaaattgccagcgcgtccatgtttcgttaacagtggcaggaaattcccaaatttgttcagttttgagcaagcttgcatgagaaacccaggtttccataactcgtacaatcctacacggtcttgtgcactaaaattttttcaggtttactaaaaattgtttcaattgcatacattttgtagatttcagcacaatttaaaggcctttaaggaccaccaaattaccaccggtaaattcctggtttcttagtccggcaaaggccgagcgtttaatcgtacttggaag

SEQ ID NO: 40380 - DNA, 332 bp, Oryza sativa
  Clone ID: uC-osroM202028a09a1
aacagataactccgacatgaaattgccaaatgacaggtgtatgaaacacaggtaaaatgccggaccccctaggtacaaaccattgagacaaaaagaaaagaaaggagaagaaaaaggaacatcacatcccttggcacgcagacttcacttcacatagagctagaacactcaggaacactggtgcatgcgctgacactcatgatgcaacaacatggacatgagatacccaatggatagctccagagcaaattttctcttttggtttctacctacatttccagccaaaccgtggcatctgtcttcatgatgaataaaaggcacatttgcatgat

SEQ ID NO: 40381 - DNA, 447 bp, Oryza sativa
  Clone ID: uC-osroM202028a09b1
taaccgtgttggtgcgaattttgaccagcgtggtcttcactcaccaaatcaccaacaatctccagatttaaggaaagaaggcaccacaacatcaaaatatgaagctgaggttagcaggactaattctggcagtggctctggtcgacgagctggcttggacagcatggatgtgacaggttcacagatgggtagtcctgctcacgcaggaaggaagagggaatcatcgcggagtactgataggcagcgtgcagtcgcagaggccaaaacatggggggagaattcaagagaaagaaagtggccaaatgctcgtggcagctttgatagtacaaatgagtaaacctctgaagcagaaagttcagttaaagtcgtcattctaggggaaaaaaaaagatgaatcacttgcagaaccccactgggtcgaattaggtacatggggcattttcgctc

SEQ ID NO: 40382 - DNA, 421 bp, Oryza sativa
  Clone ID: uC-osroM202028a10a1
gctaaagaaagcaatcatttattcacctggagatccattttttgagaaagctgttacaggcagaattcagatgactgagaatacacagatgaatttcagagagtgattttgtatatcaataaagtctgaacgcacatgatttgacacacgatgttaaaattcactagtcattatacacacaaatctttttggggcagcagacaaaccagttatttgtataattgtattgcaacctactgaagtgggcagcaaacttaagtagacaactggtttgctcaattgcaatttcacttagccacatcacttgtccatccaaatggtgcatctgagactcttcccctgcaacagaaggtcaaatgccgtgttgatgtccttcaggggaacctcgtgagttatgaacttgtccaacttcagctccttg

SEQ ID NO: 40383 - DNA, 371 bp, Oryza sativa
  Clone ID: uC-osroM202028a10b1
ttcgccgcgccgacagaaacctctttactatgtcctctttctcgcgtacatggcgggtcagatcccccaacccatccgttgcaaagcggccgtgtgcagggccgctggcgagccgctggccgtcgaggagatcgtcgtggacccgcccaaggcgcacgaggtccggatcaagatcgtctgcacctcgctctgccacagcgacgtcacgttctggcgtatgcaggatttccccggcgttttcccgaggatttttgggcacgaagccttcggggtggtggagagcgtaagggagcattggaaggggttcggcgtcggcgacccggtggtgcccacgttcctgggccagtgcaccgagtgcgtggactgcgcct

SEQ ID NO: 40384 - DNA, 421 bp, Oryza sativa
  Clone ID: uC-osroM202028a11a1
gagccataaaaaggtatagtatagtatacttcaaccaaaaagttatacttttacaccatcacaacactaagcaacaagaacagcagctagcagcaatccctagtgctagtgggcagatggatcaatttggattctcttctttccaaccaatcaaacttttcatatatttttttccctttgggtagatcagacatcaactattctgaaaaatagtaaaatacaaagaggagtttgatctactgctgctttcttctaccatcacagggagagtgagagagagatcacttcatggcaatgccaagaacgagaggaggaggacggtgaaaaagatggccggctcagccctcgggagcaagccggcctccgcggccgccccgtcgaagttgctcgtgcccggcgggctcagggcgctccccatccc

SEQ ID NO: 40385 - DNA, 480 bp, Oryza sativa
  unsure (1)..(480): unsure at all n locations
  Clone ID: uC-osroM202028a11b1
ttctgagctcagctcatccccagctgcctacctacaattgcggtgggtgcggcggccctcctcctccctcccgcgcattacaacagctacgctacggccccacccaactgctcttcctacgcgcggtcatcgtctgcttcttgttaattcgaccggcggtgatggagtcagcggcggcgttggcgttggttcttgcggtgctcctcctctcctccaccctcgcggcttcagatttctgcgtgtgccggtcggagcagccgacggcgctgctgcagaaggcgatcgactactcgtgcgggcagggggcggactgcacgtccatcctctccagcggcggctgctacaacccaaacaccgtcgccgcccactgctcctgggccgccaacagctacttccagaagttcagggcctccggcgccacctgcgacttcggcggggccgncaccctctncttcttcgaccccagtttctttggatgca

SEQ ID NO: 40386 - DNA, 370 bp, Oryza sativa
  Clone ID: uC-osroM202028a12a1
cacaacatgggggggggtcaccaaaccatgcaaaactttaaacagaatctgtgctacagtgtcaacgagtaaaaacatctgaaacaaaattcaattggacgtttgctctactatccaagggcttcaatgatgaatcagttgtcacttctgggatttcttttgttgaatcaccttctctcgaggaaaaattccccactcagttagcttcttacatatatcagaaagtgaaacaaagcatgaaaaacattccttaccaccttcttgaagtagaccaacaaaattggcttttcaattaagcaacggggctcctgagctaccctttgctaccattatatcccccttaattaaattcatattatagccatactca

SEQ ID NO: 40387 - DNA, 334 bp, Oryza sativa
  Clone ID: uC-osroM202028b01a1
gacagggaaaaacaaccaactttttcctccaaaacagcatgtatggggttttgggacaccttttagaaacatttgggggggtaaaacagacaagcgaccgaccgaacgacccctatttttccctatcctaaaggggacgaactttttgttgggtttaagcttacaattgcaatacaattttacaacccattggactgctgtggcaccagatttttttaaatggtctatccaataaaagactctgtgcaaaatttccacggacatacaaattattggcgatggaattgaccctaaaccctcatagtaggggacccgaggggggcggggcctttgg

SEQ ID NO: 40388 - DNA, 432 bp, Oryza sativa
  Clone ID: uC-osroM202028b02a1
ggtccggaaactgtttttccataaggcaacattattgcaacttgtgcaagaacattagtacaagttcagctttactttatgggatattttggaagcagcgtttctagtcaaatatgatcatcaatggttcttatccccagccatagcatgaccattgacaggggtccaaatcaactagagtttataaaaccaaccacattatatagtaaacattggcttcagagttcagatccacaaggttcacagccactatagcaagtacagataaggtagaagctaagtaacttgttccagcctcatatagcagttacagatagatagtttcactgccaaatagtacttgagactttagcatctaagctagacacagcacatactaacatactaacatagctatatagcgcaactagaagcgcccgacagacacatgcc

SEQ ID NO: 40389 - DNA, 505 bp, Oryza sativa
  Clone ID: uC-osroM202028b03a1
attaccaagtatctttattgtggcatataatgaaatagttggaaagaaagtacatgtttaatgacctcatcataccagctaagaaattgcaacgaagaaatggtaagaacatcaggactgaaacatgaggtcagtatctcaaatatgaaaagtaagccatcgggtctgaaaaagttgaacatcatcgcctcaaagcagacgtacctaaacgacaagtcagatacctttcttcagcttaatccatctctagctgctattttctcagatgtaacacctggaaattcagggtctcaagatagcatctaaagaaatcccaattgcttctaaagctcgctagcatatcttgactgaatagatgtgtgcaaaatcaagcatgatgcctcggtaactgcattttcgtcccatatgcacgcacaccattgatgatctaccatgataatatatctgagcctgatatctttcctatcccctggatagaacgaggcaaagaatctgaatgggtccg

SEQ ID NO: 40390 - DNA, 355 bp, Oryza sativa
  Clone ID: uC-osroM202028b04a1
ggggtcaacatctttttaaatatataaatttgatacatgaaaatcatacatgtcgattttgcatcaaaaagcactttcctagtataacacattgagcgagttctattaagtattttacattgtatattagtgatcaaagttgtatttgagagaacatattgatgcccaaaatgaagtctatttgcgactttgagggactacaagtatgtacagtaaacataagatcaatcatagcatccaatctacttctaataaatggtcaagacaaaaaaagcgcttaccataatctggcaaaactcttctttacatttaccagcagtcaaatgccatccaacatataagtgccagtttccca

SEQ ID NO: 40391 - DNA, 381 bp, Oryza sativa
  Clone ID: uC-osroM202028b05a1
agtgctaatattacggagtatttttgcaaagggagtaatcaaagttccaatacgaaatcgcggtcgtagtagtacaatacaaagacgagttcacggagcgcgtaaactaataaggaaaaattaaacgtcgcggagaaataatagccgaactggatgaagatgagcagcactgcctcttgcctagcctagcccatcatggcgaggccgacggccccgaccagcaggcccatcaccgaacgggcctcgctgccgctggccccgccggtgctgcccgtcgacttcgtcgtcgtcgtcgtcggcgtcgtggtcgcgtccggcgtcgacgagggcgtgtccatgccggggtccgatgacggcgtggcgggcgtcgcggtggacggc

SEQ ID NO: 40392 - DNA, 451 bp, Oryza sativa
  Clone ID: uC-osroM202028b06a1
aaaattctaatacatggtggatggctcaatgtgttacttcgtgatagctcaattatgtgctattaatatacagaaggcatggaactacagaactacagaaaagcatagcatatgtacaacatgagtcactcatattactctcaaatacgtaaatgtctttccctaatcaaattcaggattttctgatttatgtgctctgaaattgtgaaccacctgaagtagaactctttgtctgcgaagaagctgtgctattatgcatctgcgaagtttgacttgatgaaacatctgagaaaaaatttatgacatcagggctttcatcaagaaccttcagtgaccttggaacaggaggcatgttgacatcaaggaatccctctaaaatttggacgacctgacccattgtaggtctgccattttcatcatcttggatacaccagcaggcaaccttgcaagc

SEQ ID NO: 40393 - DNA, 448 bp, Oryza sativa
  Clone ID: uC-osroM202028b07a1
agattaagtccgttttggattagtaatccgaatggtgctttaggaaagttcgtgatcagagacaaaagaattggagcggaaaatgtgcaagagcaccatcatttctcttgatggaaccattgtatttaatcagtctactcacattcccttggccacaaaataagcctccctcaaatgaaccttttgctatcagaacgactaatctaaggtttacatcatattcgtatatacccaagacaagagaaagagaaacgtatcatggcaaaagaaaaaaaaaacgaggaagaatcggtatatgaagttgctttggttaagtttttcatcggtacaaatctcccaatctcagatgagcctctggggactaacagctcatgcgctgatgacacctgacatccaaggcacaacgacaggggcagtgggatgagaatctttggatgactcggaatac

SEQ ID NO: 40394 - DNA, 316 bp, Oryza sativa
  Clone ID: uC-osroM202028b07b1
ttgaagaccccctcgcgcagaaacgaaagcggatgcttctccggattccagacgcttatacgcctcacagtaggagcagtcgccggcctcagactgcgagtgttaggggtgctcgcggacaggggagatccaggcgagggagctcggaggatcgatcgacgggtgaccgatggagcagcagagcgcaatgccacgtggaaggccgtagggatggcgggggtggcagtggcggaagcggtagtatggcaaggggcgtagcgcgcgcgggagttttcggtggtcgcgccgagaccgcgagggggtgctagtaccggcg

SEQ ID NO: 40395 - DNA, 374 bp, Oryza sativa
  Clone ID: uC-osroM202028b08a1
atatcgaagcagctgtgctcaaattaactgaaaaagtttttaatcacaatgcatgcacttccagtttgaagttgcttatgataagatgcataggaatgtaacaataaactggaaagttttttgctgactttccgtacaaaataaaccatcaaacgaacatcatcacaactccaggtagctcatcggtggaagaacagaaattctgttagatcgaatcaaccacagacaaaccccaagtcctgacctcggatctagtggtgggcggcgccggcggcgccctgcctctcgagctcctcgaggtgggcgaggtggcggcgctccttggggaggttgatgaggtaggagaaagggcatgaggccgtaaatgacgtgga

SEQ ID NO: 40396 - DNA, 324 bp, Oryza sativa
  Clone ID: uC-osroM202028b09a1
gaaagcaaaatgattttattaactttcattattccatgtgaataattcctaatgaaattatccatgcctcaaggttactcacatttgcaacgacttatccctgagaccctgaactacgaagaatcacggtaatgcacactgatacaaacaatgaaacaaatcgacgacggcaaacgcgcaacactagcaatagcacacgtatatggatctaaagaatgcacgcgagactcacatggagatgctgttggggatgcccatgggcggtgagcccttggcccttttccctggggacatccgacgtgttggggaacagcaccatgtacg

SEQ ID NO: 40397 - DNA, 456 bp, Oryza sativa
  Clone ID: uC-osroM202028b10a1
aaccaaacatccactgatgtgttgaatgaaattcaccactgcgaggatctgatacatagttgatttgattacccgataagatctatatatatcttacagacgaacagaaagataacacctaacataacttaattactgataataagaactatatatgtcttgcctttgacactggacataatacctaacacgaatttagtgctactattcttcacctgacattgaactcacgctcaccaaaccacaaatcacaatcactaccgacgaattattcatctaaccaaacctctactattattaccactactgttgtactaacagatcagcaacaccaagccagcctaaatttccaccaaactaaccccaatttttcccaaccaagacaccacctaaaaaccaaacttaaaagacaaagaactaatcaaccttaggtgttcttcgtagaagcaaaccccc

SEQ ID NO: 40398 - DNA, 438 bp, Oryza sativa
  Clone ID: uC-osroM202028b10b1
atcccaaactcttcttgtcccctctcgttagggttaggtttttattttgtctctctcgatttctctcttcgcttccacttcccaaaattctcgagtcaaacctcgtggcgttcggccatggcgacggcggcggtgctcggatcccacgacgccctcgacaaccggatgcatctgggggccttcgccgtgtccccggcgtcgaagccgaggcggaggcggcacagcaaggcggcgtcgccgccccccaaggtggcggcggtgagctcgccgccggtggttaagtcggcggcgagggtggcgtcgcctcctcccaaggctgcggcggcggcggcggtgcctcaggggcgtcgctcgccggtggcgaggaagcaagggtcgccgacgaaggagttgccgaagcagaggcttgtgatgggggagaaccggatcctcaagcgc

SEQ ID NO: 40399 - DNA, 403 bp, Oryza sativa
  Clone ID: uC-osroM202028b11a1
ggctagcaatatataatataataatataaccattgtacatttatggatcatacaacagccatgaggcccccacagggaatgcagagcatagcggcacgggcaaacagagtacagtggagctaagccaggagaggactgaagaacgcaaaagatcatagcgctggctacctcgcatgtgtccgaaagttttatatggcttctccccaacattacaagatgcgaccatatgatgcccgctatttgctcccatcaagccccataatggcagcaaagaatggtcatgcctggttgctgtccgatgtggaaacttccgcgctgcacattgggcaaaccttatttatttgaagccattggtttatgcactcaggatggtatgaatgcttgcaggggagtgcaatcaaag

SEQ ID NO: 40400 - DNA, 439 bp, Oryza sativa
  Clone ID: uC-osroM202028b11b1
ttggcgatggcggattcgaaggggagcggcggcgccgccggcgacaagcccggcgccgacgcgagccccgccacgaatccggccccgccagctgccgccgtggccgtcgccgctgcggccgcggacgccggaggggacgacgacgtggccgcggccgcggaggcgcggcggacgttcacggcgctcagccaggtcgacgccgacctcgccctggcccgcgtgctccaggagcaggagcgggcgtacatgatgcttcgcatgggcggaggcgccggcgagggcagcgattacgggagctcggatgccgggagctacgagtacgacgacgaggccgaggaggactaccaggaggagctggagcaccaccttcgggtccaccaccacgagcacgccgctggggagggtcggggcgagggagagcgagatggggagggggctg

SEQ ID NO: 40401 - DNA, 281 bp, Oryza sativa
  Clone ID: uC-osroM202028b12a1
aggcttgcaaactgtgcaattgattttattttcaccatggatacgtgaaataatcacaggcataataacaaaagccatactttctgtgttaaagatccaacagggtcagagaacacgcaagatcataacggctgctaatcaaaattggagcaagtttgggggctcatagacagtcatacaggggaggatttactttgcgaatctacgagctttttaactagagatcgaccgggaagtcaattacggataggaatgagcctcccgtctttacaaaacccatg

SEQ ID NO: 40402 - DNA, 447 bp, Oryza sativa
  Clone ID: uC-osroM202028b12b1
ttcgtttcattcaaggaggccatgaagatgggtgttgaagtgtaccacaacctgaagtctgctatcaagaagaagtatggtcaggatgccaccaatgttggtgatgaaggtggttttgctcctaacattcaggaaaacaaggagggtcttgagctcttgaagactgcaattgaaaaggctggatacactggcaaggttgtcattggaatggatgttgctgcttcggaattctacaatgacaaggacaaaacctatgaccttaacttcaaggaggagaacaatgatggttcacaaaagatatctggtgatagcctgaagaatgtatacaagtcatttgtcagtgaataccccattgtctcgattgaggatccgtttgaccaggatgactgggaacactatgctaagatgacccgtgaaattggagagcacgtgcagattgtcggcgat

SEQ ID NO: 40403 - DNA, 409 bp, Oryza sativa
  Clone ID: uC-osroM202028c01a1
tttgttttttttttttttttttttttttttttttttttcaaaatttttttttttcctctatttttttaaggatggaatggagtaggaaaactttcaccccaaaagacagccatagcgacaaaaaccaaaaaaagccgcatgctcagccgccagggcgggcaagctgagcagagcagctaacacaaagaacacgagaccactataaaccaaacggcaacgaacgaagaaaatacaggaacaaaacttgtctgaagaaacacgaagcggaacgattactgttattcaaaggctccactcctcctcgaagatgggagcatggcaacggcaaaggcgaagggatccaggcttaaccgaagggaaggggctcgccgacccactccctgaggcacccgagcaaggggacgaggag

SEQ ID NO: 40404 - DNA, 331 bp, Oryza sativa
  Clone ID: uC-osroM202028c02a1
gagtgaaccgattacatggtacagctccatatcatcatcatcatcatcatgtttatgtacacaaacatcttctttacaagtacagccatggatttttctttttacatggcagtagtagagtagcactagtagtatggtgatggctcaagcaagccctttatctctctcaccatggacaagaacaacatatatctacaaaacacctcacctgacctgactcttccatctcaacgaacacaagacttgagatccagaaaccaattcagtaaaaaaaaaggaagaacaataattgattaaaaatcctctcctcctccgtggttggtttgatcat

SEQ ID NO: 40405 - DNA, 369 bp, Oryza sativa
  unsure (1)..(369): unsure at all n locations
  Clone ID: uC-osroM202028c03a1
aggtaaaaggtttaattaacataggagtacagcagaaaataacaataaaaagatagcatggaattaaagccgctgctccaatttaccatacgcagcatttgattacaggaataccaaaaaactactaccgatgacaggtattaattattaaaaagcacaggttcagattattgcgacaaaagtttttgatacccgtaagattggacgcttgatagccaaaccacactcagaaccctaaatatgcatacggaggatgtccaatcggatcttcagncaccaccagaggcagatcagtacttgtagtccttgacgtgaaggctctcagaggcacccttgcccagcacagcatcaccctggtatgtaccaagg

SEQ ID NO: 40406 - DNA, 396 bp, Oryza sativa
  Clone ID: uC-osroM202028c04a1
gcccaacaatttatcagaaaatgcatagcagttcgcaacctcagttacacaaatagcagccaagagcgcctagaatacaaaagctgacccagaaattcgagagcagcacatcacaagagagtttgagagagggagagagccagcaaggtagagcatttatttagtaatcgttcacttgccattgccagggttcaaaacatttcagctatctttgcacctacaggctcacggtcttcttgagggaattgcccttctcctccaagctcccaagcaggctgtcgaaggccttcttgaaggagtccacaccttccagctttagctgcttgccaaccttatcccaatctatacccaggttctccagggcactgtatacaccttcagcatccgaaacgtttg

SEQ ID NO: 40407 - DNA, 380 bp, Oryza sativa
  Clone ID: uC-osroM202028c05a1
acaaataacagagcagagagactttatttttacgtactgaatacaatacaagtgatatgaatcaaacaataatttccaaaaaataaaacaaacatgtaccccgatgcataatctcgcgtacgcgcggagaaggccacaaattaaacaaaatcatatcgaatcaaaccagatacgtacttcttgccaccaaatgcacgcatgcatgaacatgcccatgcatgacaagtgacaacacgctgctagcacgtaggaaccaaataaacccctgttgcgttgagacgtgcatggatcgatcgcgcggctactttataaagcctttagaagcacttgaagccggtgggcacgcgcttgccgcaatagttgaggatgaggctgaggtc

SEQ ID NO: 40408 - DNA, 502 bp, Oryza sativa
  unsure (1)..(502): unsure at all n locations
  Clone ID: uC-osroM202028c05b1
gcatccagagatttttaatatcggtacggtgtagtgcgcgtgatccagcagcagcaatggcaggcaaggcctcgatcgcgctattcctcgccgtcaacctggtggtcttctcgttgggcagcgcctgcggcggccactgcccgacgccgacgccgccgaccccgtcgacgcccaccccgactcccgccgcattcggcaagtgcccacgcgacgcgctgaagctgggcgtgtgcgccaacgtgctgggcctcatcaaggccaaggtgggcgtgccgccggcggagccgtgctgcccgctgctggaggggctcgtcgacctcgaggcggcggtgtgcctctgcacggccatcaagggcaacattctcggcatcaaccttaacctccccgtcgacctcagncttattctcaactactgcggcaagcgcgtgcccaccggcttcaagtgcttctaaaagctttattaaagagccgcgcgaacgatccatgcacgtctcaacgcaac

SEQ ID NO: 40409 - DNA, 210 bp, Oryza sativa
  Clone ID: uC-osroM202028c06a1
atcagggggataacaccaagttacaaaaattatacagcggaaccagtatactgaaactacttaaaagtacatcatgtaaagtcacctttagtcacctaaggaaggtaaatgacgtcgcagaaggaaacaagcctacaattggatgccattgtgtaggaacattgggccttgaagcttacctgggtcaaccaatgagcctcgtccaagggc

SEQ ID NO: 40410 - DNA, 160 bp, Oryza sativa
  Clone ID: uC-osroM202028c06b1
gtctatatatgagtgctcccgggtacagtggtgtgtcagctggactggtacgaccagatgcacacgggaaccctgatcctgcttggtgtcttcacagccgcgatcagtagggcggatgggatgacatgcgcctgaaccagagtaaagggaattgtggaga

SEQ ID NO: 40411 - DNA, 499 bp, Oryza sativa
  Clone ID: uC-osroM202028c07a1
cacagttaagctgaagacattgtattataggatcaaaacatttctattaccacaactttttaaggatggaatcgagtagcaatactttcaccccaaaatacagtttagcgacaatatcttagaaaagccgcttgctttgccgccatggctggcaagctgagcagagcagctaacacaaagaacacgagatcactataaaccaaacggcaacgaacgaagaaaatacagggtcttttttgtctgaagatacacgaagcggttcgttttcttttatttttagtctcctctcctcctcgatgatgggtgtatggcaatggcaatggcgatgggatcttggcttagttgatgggaaggggctcgccgttccactccttgaggcagtcgagcatggggtcgatgagcttgccctggctgatgccgaggaacaccttgttgcactcctcgccgggggacttgagcttctcgccggtgaggaatacgcagccgagctcctcgcgga

SEQ ID NO: 40412 - DNA, 380 bp, Oryza sativa
  Clone ID: uC-osroM202028c07b1
ttaccttctgctgcggctcttcttcagtatcgaatcctttcttctcctcgtgcccaccaccaccaccgcagcaatggtgggcaacgggccgatcaacaaggaggacccgctcaactggggcgcggcggcggccgagatggccgggagccacctagacgaggtgaagcgcatggaggcgcagatccgcgagccgctggtcaagatccagggcgccaccctccgcgtcggccaggtgggcgccgtcgcccaggccaaggacgccgccggcgtcgcctgcgagctccacgaggaggcccgcccccgcgtcaaggccagcagcgagtggatcctcaactgcatcggccacggtggcgacatctacggcgttaccaccggctttg

SEQ ID NO: 40413 - DNA, 401 bp, Oryza sativa
  Clone ID: uC-osroM202028c08a1
caatacaacaaagtacatacattttctacatgtatttgtcaattactatatgacgaaagttatgtgaaccctacagcagtgtaacacctgtagcatcaagggtagagatttactgtacattcacgcaatcataatcttccttatttgcggaagttgcttcgtagtaacaacaaagaaaacaattgcatacctacagactacagtgatatgtacagctaaagtacagactaaaagccagcatatatcaaaatgcaaggcgtaataatgtgtaacagatcagcaatttcgcggtctgttataattcggaggcagagaaggacacctttcattcatgtgagggtacggctgcatggtgttgtatccaggcaactccatttgatacctgccctttatttggcaaa

SEQ ID NO: 40414 - DNA, 387 bp, Oryza sativa
  unsure (1)..(387): unsure at all n locations
  Clone ID: uC-osroM202028c08b1
cgcgaaactcgcggtgggctcccagacctaaccggcggcggtggcggcggccatgggaggagcctacaacctcaagctcctcgccgccctctccgcgctcgtcctcctcctcgccgcctcgcgccccttcctcccggggctcctggaggcggccctccgcgcccccgtcctcccgcgcgacctcctccctctcctgccctggccggtggcccagccgctgctccgccgcctcgcgctggcgcggcgccgccgacctcctcccgtccttcgtcggcgtcgcgcgggagccaggtgtgggcggcgcccgcgccgncgagtggaagggcgcctgcttctacgataaccgggcgtggatggagttccacaacgggactgatgggggccttg

SEQ ID NO: 40415 - DNA, 386 bp, Oryza sativa
  Clone ID: uC-osroM202028c09a1
attggagttgctcaggggtaatgaaggcacccttattactattaaaaatgcacacatcgtacttcacaaggattggtaataaatccttgtagctctggttagaactttgattcaaaaattcgaacgaatccacatgagtttgtccagaaaatgttaccaatactgctccttttctaaaggtataggtgttgtgcactggtttccaattgggatggaggggtgcagtaggtccatttggactggtgtttaataatacatattcatatcctctagatgctaataaatggtatgcttcttccactggaatctttttggtcgataatggtacatcagcttttgggatcgctttagattgacgtttgcttcttaaatagctttcacgtttt

SEQ ID NO: 40416 - DNA, 241 bp, Oryza sativa
  Clone ID: uC-osroM202028c10a1
ataacccgaactttatttaaacaagggaaaattaaaaggggataactgggtttttacatttaaaggtggtcaaaacttcctggtcccttttgggggttttaaaccccctaactggggggataactggatccttggtgacaatcccttcaattatttgggggaaaaacagtaccaatatcttaaaaacatgacagtttttcaggaacccaatgggggcatttttggaaccatttaaacccca

SEQ ID NO: 40417 - DNA, 394 bp, Oryza sativa
  Clone ID: uC-osroM202028c11a1
acgcaagtctgaccataccatgtacacctagtgacctcaccctgcctatcaacagggcacccgaccaaactaactcaatccatgaataaaaaggtccttttctctgaacacaagctagtagggttcatcatcaacacaagctagtagggttcaacatcacaactaaacccagcaggcaaaattgtttgttccttacaccaagatctccaggtgtggctccttgtctactgcggctttattttcgggaattttttatttatatggtgaacaaaggcaggctgattgttccaggcgaactctcgatgtcggtgcacgctgatcacaacagaagggaggggaaggagaggagcctgtgatggtgtcgtgatggctgacaacttgaaattatgggcat

SEQ ID NO: 40418 - DNA, 430 bp, Oryza sativa
  Clone ID: uC-osroM202028c11b1
gtacaatcttgagtatcttggtcgagttgttttcaacacagatggaattatgtatcctgacagcgtggttggtaccgattcacatactactatgattgatggtttgggtgttgctggttggggagttggtggaattgaagcagaggccacaatgcttggtcagccaatgagcatggttttgcctggtgttgttgggttcaagttgactgggaagttacagaatggtgtcactgctaccgaccttgttcttactgtcacccaaatgttaaggaagcacggcgttgttggcaaattcgttgaattctatggcgaaggcatgggaaagttttctttggccgacagggccacaatcgcatacatgtcgtctgaatttggagccacaatgggttttttttctgtagaccatgtgacactagattattttaaattg

SEQ ID NO: 40419 - DNA, 330 bp, Oryza sativa
  Clone ID: uC-osroM202028c12a1
aacccaaatccaacatcacctccatatccatatagaatctaaatttgttcgcatttcctacgtagataagatcactaggttgaacacagcatgataaaagaccatcctacttggggcatctatacaattgttgtttttgggtacgcgacttatgataaaggcagagcattttcacattcactgatgaaaacgtatatgaacacgatgtgacgcgatgcgaggaactcagtcggctgccctgaagagggccatgagggagaggaagaggttgatgacctccaggtagagggagacggcggcccagaactactggtcgtaagtgtagcgctt

SEQ ID NO: 40420 - DNA, 455 bp, Oryza sativa
  Clone ID: uC-osroM202028c12b1
ttttctcattatcctccccttcatcgtgctctgcccgctgtactactaccaccagaagcacccggtcaacctgatcctgctcggtctcttcaccgtcgccatcagcttcgcggttgggatgacatgcgccttcaccagtggcaaggtcattctggagtctgcaattcttacaacagttgttgtgtttagcctgactgcctacacattctgggctgcaaagaggggccgtgacttcagcttccttggccctttcctcttcgcctccctcattgtgctgctcgtgtttgcgttcattcagatcctattcccgctgggcaggatcttccagatgatctatggcgggatcgcgtcgctcatcttcagtggctacatcgtctacgacacggacaacatcatcaagcgctacacctacgaccagtacgtctgggccgccgtctccctctacttcgacgtca

SEQ ID NO: 40421 - DNA, 373 bp, Oryza sativa
  unsure (1)..(373): unsure at all n locations
  Clone ID: uC-osroM202028d01a1
aatgggaacccacatgtcattgagaaaaggggcaaaagttaaaagcccctttgctggagcaaaatgtttttcgctggcaaatttgtacaacctaaaaagaaaatctactagagggggctttcaatcaattggaattacacacacacacactatgaggaaaaatttttttctcacacttcaggttttgcaagcctaaaaagaggggcttggtcattcttttcaacaaactaatgcctttggatacgaattaaacncgcacatttagaaacggttcaaaagggaaaagtctagatttaaccccccaaaaactgggcaagaaaaaaaattttgacaacaaaacagaaacagcacaaaagatcattggcaatggcaa

SEQ ID NO: 40422 - DNA, 433 bp, Oryza sativa
  Clone ID: uC-osroM202028d02a1
aacatgcaacaatcatcatctcattgttcaagagttcaaacattatcgtcgtcatcatgggacgaggaaaatttgccagacacgcaccagagatgggagaacatctggactctggtctcttctaagtgaagctaacagtcaggctaaggtaacaactcccaagaggccaaagataagacaacagcattcctgaaacaacatgagacccaaaaagaaacggtgcgggcgattcccaagcacaacgtacactggcaggcgttattcgtgatgcccgtcgaagatttcagcgctgctgccaatggtattatgttcttagaaccacttgaacagcagaccaccgtgtgtggcgaagaaaggcgcaaacacaagggactcgacggccatgagcttgatgaggatgctgagcgacgggcctgatgtgtccttgaggggg

SEQ ID NO: 40423 - DNA, 406 bp, Oryza sativa
  Clone ID: uC-osroM202028d02b1
ttagagacgcgtcacctcctccccgccgccgccgccgccgcctcgcctccgttgcaaccgtagtagggttagggttttcgtggtgggcgccgccgccatggcgatcctctcggcgctcgggaccgaggtgttcatccccgtcgcggccgccgtcggcgtcgcgttcgccgtcgcgcagtggctgctcgtcgcgcgggtgaaggtcaacccggcgcacgcggcggcggccgcggcgtcgggggggagcaagaacggcgggtacggggactacctcatcgaggaggaggaggggctcaacgaccacaacgtcgttgtcaagtgccacgagatccagaccgccatcttccaaggagcaacatcatttctcttcacggagtaccaatatgttggtatcttcatgtcaatc

SEQ ID NO: 40424 - DNA, 371 bp, Oryza sativa
  Clone ID: uC-osroM202028d04a1
ggtgatcccaagaggaattgttataatgacatagtttatcactttacataccacaaacaccataattaacccttacaaaaccccacatggacccagacaaaagaccatcccttattcagccccaaaacaataatcataagagtcgtacaagaacaccatttagcagcggcagattaaaggccttgaaattttcaaagcagccaccagaagaacaaagatgaagactttttgatgccaaccacagtttagctcaaagctgactttcccatggcgcggccttcgttcagtcctggagcatgtgcccggcggcggggtcaggggatctgccatggccggagcacaggctcgtggggggggcactcctcctggat

SEQ ID NO: 40425 - DNA, 393 bp, Oryza sativa
  Clone ID: uC-osroM202028d04b1
tttttatttgggtggctgccattcatctccatgtctcgttccattgctccccccaaattcttctccaatcagctcgattccgtcctcttcgagcagatcagctcccgctgatcgaatcggtgtcgaattttggtcgtggctgctgctcttgggttggatcttggcggtgagaaagatcgtgatttttgttgctgcgatttgtgaggaatcgttcgcgctggagggaggagcagagctcgctggccatggcttgccgcggcgagcagagaacagatctgtgagctctatgaagatcgtcactcacctgcgccgatactgcttactgcactccttatcggatgacttactctactggtttcatgagagctcataattctgggggaatcatctttt

SEQ ID NO: 40426 - DNA, 416 bp, Oryza sativa
  Clone ID: uC-osroM202028d05a1
aggttcaaatccaacttattcataaagcatactgctgtcccacaggaaactgtttcataaaactaacatatcatacggactcgatggtccattaaaccagacacaagtagacatcagcaccacaaatacttgacgaacagaggctcgggacgaccaggcacatcggcagctccaccaaactggctgattactgaccaccacggaggcggagcaccaggtggagggtggactccttctggatgttgtagtcggcgagggtgcgtccatcctccagctgcttgccagcgaagatcagacgctgctggtctgggggaatcccctccttgtcctggatcttggccttcacattatcaatggtgtcggagcttttaacctccaaagtgatggtcttcccagtcaaggtcttcacgaagatc

SEQ ID NO: 40427 - DNA, 472 bp, Oryza sativa
  Clone ID: uC-osroM202028d05b1
tataaatttctccccaatctcgcgaggctctcgtcgtcgaatcgaatcctctcgcgtcctcaagatgcagatctttgtgaagacattgaccggcaagactatcaccctcgaggtggagtcctctgacaccatcgataatgtcaaggctaagatccaagataaggagggcatccccccggaccagcagcgtctcatcttcgctggcaagcagctggaggatggcaggacccttgctgactacaacatccagaaggagtcgacccttcaccttgtcctccgactccgtggtggcatgcagatctttgtcaagactctgaccggcaagactatcacccttgaggtggagtcttctgacaccatcgacaacgtcaaggccaagatccaggacaaagagggcattcccccagaccagcaagagcttatttttgccggcaagcaactggaggatggcaggacccttgctgactccaca

SEQ ID NO: 40428 - DNA, 468 bp, Oryza sativa
  unsure (1)..(468): unsure at all n locations
  Clone ID: uC-osroM202028d06a1
gagtacggcatacccggcactgacttggatccaccacctgcagtcatcgccgggtccatgccagcgggctccatggccggcgcggcggcagttgcccccgtggacggcgtcgccgacgagccgccggccggagcagagcccgacgtcgaccctgtcgcatctgcgcaggcattgggaggcaggttgcaggcggttgggagcagcgactgcaccccgccgagcaccggcgcgagcggggacggcgccgacgccacggcggcgcagaggcagggcgcctgcgactggaacatggcccgcatctgctcgcagcacgcgtccgacggcgtcgacgagttgccgatgaagtagctgacgcacggcgacagcgaggcctgcaccggcgggcagctcggcgcgttcgccggctgaccgggcggctgcggaggctgctgctgntgctgctgcggctgcgccgaggacgccatgatc

SEQ ID NO: 40429 - DNA, 461 bp, Oryza sativa
  Clone ID: uC-osroM202028d07a1
gcgtgcaagttttgaaccgtaaattaattggtatcggtatacttaaatataggataccacacgtatatttattatatctatatatacaagactcaaccaagactgattgagatttccaagattctctctacaagtttctgacaaataagaaatgcatcgaagcatcaaggagtgaacaattttcctgaactgttcatgaaaccatgcatctctgatgaagattgtgaaacatctttgatggccttctactcttctagcatccgtgcagagcaggtttcagagcttggacagtgcagagtccatcacggcgacgaagaaatcggcatcctccttggtgaagcacagagggggagtgatcctgaagaccttcccgtagaagccgcctttgccgaccaagacgcccatctctttcatgtgctccatggcgcggcaaatctcgtctttcgccggcgtcttgagct

SEQ ID NO: 40430 - DNA, 409 bp, Oryza sativa
  Clone ID: uC-osroM202028d07b1
ttgccttcgtggcccgtaaagtcctcctctacctcccccgaccgctccaggggcaccgtgagctcgggctggcactgattaggcgtgagatacaggctgaggaacggatggggctcacattctaggagcagtgatgggagggcatgtaacccatctggttgtatgggacctccatgagcttcatggccggctacaccttcttcctccggaccaagaaggagccctccttcaagggcttgttcgagagccggttcgcggtgaaacagaaacaggtgatgcacgcccggtatttcgatcttcgccggaatgacgagctccggcgagccttgtacctgccggtggttcggactccgactagcacctgcagaccgatgtcgtcgtctactacgcaggagagccattgccagtc

SEQ ID NO: 40431 - DNA, 398 bp, Oryza sativa
  Clone ID: uC-osroM202028d08a1
gataaaagataagtagataaattatgaagggggtaagatttcccataaacggacatatatacgcacggtgatgaattagtatagtaaagtaattcagagctcgccggccggagaggtccatctgtcgagcatgtcgaggcactccttggggcggtactccggggcggtgtggccaccgcccttgacggtggcgaaggtgaggttgtggtcgtagacggtggtgaagccggcaacctggcggttggagtaccacggccttcaggcggtcaccacgttgtagcccagcgtccggatccactgctgcgtgccaacgaacgtcatgtccaggtcgtggtcgccgttgtacaccaacgccctgtagccccgctgcgtgagcttccggtggtaggggatggcgc

SEQ ID NO: 40432 - DNA, 459 bp, Oryza sativa
  Clone ID: uC-osroM202028d08b1
taggaacaagggtacaacgtcaccctcacacagacgggacagcagctggtggtgttcctcaccaaatggctgggcgatcacccagagttcgcctcgaaccctctctacatcggcggcgactcctactccggctacaccgtcccagtgacggcgctccagatcgccaacgacgacgacgcccgggcgcggctgaacctcaagggctacctggtgggcaacgctgccacggacgtcaagtacgacagtgggggcaaggtgcccttcatgcacggcatggggctcatctccgacgagatgtacgaggccgcgcggagcagctgccgtggcgactacgtgttcaccccgaccaacgccgactgcgccaacgcgctgcaggccatcagcatggcaaccttcgccatcaacccggtgcacatcctggagcccatatgcggatttgcgctgcgcgggcgcgcgatg

SEQ ID NO: 40433 - DNA, 441 bp, Oryza sativa
  Clone ID: uC-osroM202028d09a1
gaaagttgacacttcatagtgtaatataagagcatctaacattacaagccttgataataccgaattctgcttcacgtactcatacaacacattagtccatatactacaagtagaggtccacaggtaagaacaactccagaatgctgtcttattcgcacatatttacataagaggtcacctgggcgacatcgccatagcttaagcttgattaggcgcgacaatcgcgaataagaatttatacaaaaaaccaacatgtgaagatcttagtgtagcacgttgccttcacatgttcgttcttgcctgtcacatattcactcctgcaacaacctctgggtgatagtggagcatctcctgccacattattttccggatcatatccacgccaagatttttatcgatggccagatcgatggcacttgaggcagaaggtttgcgcttgga

SEQ ID NO: 40434 - DNA, 400 bp, Oryza sativa
  Clone ID: uC-osroM202028d09b1
ttattccacccccttcccttctctcgtcctcctcctcctcctcctcctctctctctctctctctctctcttcaaaataggtgggcggtgctctcgccttccctccccgccggcttccgcctccagatccgcgccgcccgccgccgccgcgctcgctcgagcgggagctatagctgccgccttcgattcgacgctgcatgtactggcgagaggcgtagcgcgtggcgtgctctccccgacgcgcgcctcgcctcctccccgttcattacaagatggcgatgatggtggaccctcctaatggcatgggaaaccaagggaagcattactacacaatgtggcaaacgctatttgagattgacaccaagtatgtgccaatcaagcccatcggaagaggggcttat

SEQ ID NO: 40435 - DNA, 215 bp, Oryza sativa
  Clone ID: uC-osroM202028d10a1
gcggcgctcggcgccgacgtggcggagctccggctcgaccgcctcgccggcttcgcgccccgccgggacctccccgtcctcctcgcgcagccgcgcccgctccccgccctcgtcacctacaggccgaagtgggaaggaggtgaatatgaaggcgatgaccgagccaacgattcgagggcgccttctattggcaaatggcaaatggggggctgaat

SEQ ID NO: 40436 - DNA, 343 bp, Oryza sativa
  unsure (1)..(343): unsure at all n locations
  Clone ID: uC-osroM202028d11a1
aaattacaatatattagacgcacacaccttcgatacaccatttaaagttgttggcactatngnatgttctttttaaaagcctattgtacatgcagatcatttcttcatttgggagataaggaaggttgatgagcatataggccatgtaacatggtgatgggcccacaaatttgtaagcggcttcaggaagaatgcactccatcccacgagatgtatgtccgatgggttagtgcaaagatttgttgacgggccaccgcaactgaacaatgagttggagttgtaggggcccaccatccccacagtatgcaaccaagacagtctccttcttgaacccatggacagc

SEQ ID NO: 40437 - DNA, 444 bp, Oryza sativa
  Clone ID: uC-osroM202028d11b1
tatatgatggcttctttcaggcctttctccctctcgtcgccgatgacaacgacgatgctcctgctctttcttctcctctgcacgaattccgccaccgccgacgtcgccggcagcaatggcggctgcggcggcttcaagcgcatgttcagcttcggcgactccatcaccgacgccggcaacctcgcgaccatcagccctcccgacgcctccttcaacaggctcccctacggcgagaccttcttcggccaccccaccggccgcttctgcgacggcaggctcatcgtcgacttcctagcggatgatctggggctgccgttcctgacgccgttcctccgggcgaagtcgccggaggacttccggcagggggccaacttcgcggtggccggagcgacggcgctgagccaggacttcttcagcagatggggctcaacctcaccatcatac

SEQ ID NO: 40438 - DNA, 416 bp, Oryza sativa
  Clone ID: uC-osroM202028d12a1
gaacaaaacaaacaacctgttgatccaccaatatgaaacctacctaaatgaatccgaatgaaattcactctacctataagaattccaacgactgaaaattctgtcaaaattccagcacctgaatctatctctagttctctacactactatgacttgatcctgattgctgccattccagtcgtccccttgctgttgagtatccccggcaatggccaaccggaccctctcagcctcgacctcttcagcgcgccgctgcaatcctcgtctgagtcatcgtcgccgccgtcgtcgtcgaggtcgacccagacgcctttccctttccggtcgtacagcgcggcggcctccggcgtcgtcctttcggagaagctctcgtacaggtcaggcgagtgctgccggaacaggcagtcgctcgccga

SEQ ID NO: 40439 - DNA, 331 bp, Oryza sativa
  Clone ID: uC-osroM202028e01a1
ggctggaagaaggaaaaaacccaggggcagtggcttcacaaactgccacgaaaaagggggcactggcccccacactacacaaaagcatcccacaatgggggggaagcgcaaaattaacaatttggttccttcccggaacgccttgggggggccccggggggaaggaaaaccaagcaattttttcaggccttgaaaacgaaaagaccccgaaaaaggggccccaccggcccttgcaggggctagaggaaaaactcccacattgaaagtttaggggggggggcccccacgaaaagggggaggggccccttggcccctgggggtgattctgggg

SEQ ID NO: 40440 - DNA, 363 bp, Oryza sativa
  unsure (1)..(363): unsure at all n locations
  Clone ID: uC-osroM202028e01b1
ttttctctctctctctccatccgcgagaactcgtcgggatatttatgagcgctggtggagtggcgtggcgaggtgaggaggtggctgatctctctcatcaatctcctccgtcgcggtcgcagctgcgggagtgaagccgccccgcggagctagctaaaccctagccactgcccgggcggagagttggggtttgggttggtggcggtgggccggtggcggctcggtggcggagctccggtgtggggtggtgtggaatgatgnggaagctattcgatgatttcccaggattttgactaggccacaaatggttacaagttgcattcatggtccaaactgtgtttgaacatacagattctttgcagt

SEQ ID NO: 40441 - DNA, 419 bp, Oryza sativa
  Clone ID: uC-osroM202028e02a1
attcacccgcaactcacaccatcgtagctgagctgcaatgcaaactttgcaacttttttctatgggagaagctgcatcggggagtttttaatacccctattttcgggagcagttacgcccaattaaacatccctcacgcttctcgaaactcgaaaatcgctcaacaattacattaccacaacaccaccaaccaacaaattgaagtctcccaatcaatgcatcaatgcagagtttgagaagatgcggcccaatttgtgggcgagcagccgaggacgatggcgagctccttgagccccacgcaaccatcgccgtcgtcgccgccggccacgcgtatcatggggcggatctcctcgtcggccgccggcatcccggcccagccgagggaccccttgaggtcgcagaaccccaccttggcggcc

SEQ ID NO: 40442 - DNA, 280 bp, Oryza sativa
  Clone ID: uC-osroM202028e03a1
aacgcaaaagccacggtttttggaagcccagcaagaactttatttaaaggggatcactaataacaatgatgataaaaccacatgtggaaagggggacgatgatccacaggatgggacaagtaccgaaggaacggccattattgggggattacacaagagcacccaaacgcacttacccaaaagaccgaagaaaaaggggctaatttaaatggcagatggagcaatgtagaagtagtggtaggtatgcaaccaaatcgaaatggaatgagaattttttttg

SEQ ID NO: 40443 - DNA, 433 bp, Oryza sativa
  Clone ID: uC-osroM202028e04a1
gaaattatgtcacgcattcagcatgaattaaatctcataatttcattatgatatccagttatccacatatatggacaaagcggacaaatgccggcatttcatccgctaatgggaagaaaaggaatgaagatatatggtatatagctatcagggaaaaagatacaaaaaaatgtacatttgttgatttatggtcagcactatgcaaccatggtgatctcaaggcgcaagtatatatcatgtctgtaaatatatctttttcaaaaaagtttttacatctctataggcagtgagatgcatgctaccaaggcttcaggtcgcccaccggtccagcagtccagttcagggccctctccccgggcttcaagaagacgttttcgccatgtggaagcttgcgagcgagacccttcagtatctgatggaatgcatctcctgc

SEQ ID NO: 40444 - DNA, 440 bp, Oryza sativa
  Clone ID: uC-osroM202028e04b1
tagggagagggttggagaggagaggagacacaggtgctgggaagaggcctgtggggatcaagaagatgaggaggtgggtcttggccattgccattcttgctgctgctgtatgcttcttccttggagctcaggcccaggaggtgcggcagggccaccagacagagaggatctcaggaagtgctggtgatgtgttggaagatgaccctgttgggaggcttaaggtctatgtctatgatctcccaagcaagtacaacaagaagctgctgaagaaggatcctaggtgcctgaaccacatgtttgccgctgagattttcatgcaccggttcctgttgtcaagcgctgtccgaacttttaatcccgaggaagctgattggttctcccaccggtgtacactacatgcgacctgactcccttcggtctttccttgcccttcaaatccc

SEQ ID NO: 40445 - DNA, 332 bp, Oryza sativa
  Clone ID: uC-osroM202028e05a1
aaaaaagataaacacctttcattagaaaaaggaaagaacaaaaaaatatatatactcagccaacaacactctccagccatcaccacctcacataagttacattagcaacacttgctgtggtgatcatatggttgggagcttgggggcagtagtaggagctacaagcaaaagctatacatatgtgtacattacaatggccccggtttttgtatcagcgccagattagtctcacgcccatgaaaaacagggcatgtagttgtgatatgagccaaaagatgctactactactctgtatgcgcatgttgagcaactattttcaaacccatggcctt

SEQ ID NO: 40446 - DNA, 160 bp, Oryza sativa
  Clone ID: uC-osroM202028e06a1
ccctacggaaaaagcaaatccgttttacaaagcattattattcagagtacacaaaatgacactcggtgaacaggacagactagtaataaaattcaaagggccttgtcgacgccaaggatagaccgagaccgaaatccaacgttgacacatcacggctgat

SEQ ID NO: 40447 - DNA, 485 bp, Oryza sativa
  Clone ID: uC-osroM202028e07a1
agcaagcaagcaaactgacctttcatcaaaaggattattattccagtgccttggtaggcatcactaggtactactagtagtggatgctgctctgcttggtattatgtcaacaagtactacacagcaataccaggggcaggcaggataaggaaagaattgacattgccacacacactagcagattaactgaatgaatgatatgcaatgctccacatccatcttctctcacaccagccacttggaatgaacagatggtaaaccctaggaggggtagtcaccaccatctctgcatggaataaattcagcactagaaattgcaacatcttgcaatctactacaaggaggataggaaaaattcagatatgggcacttggagttaaaactaaagcatgatcactataattaaatctcaaaatgtgtttcatggaaaacattttggccgctttacatgcacaccaactagcaaacactaacatgggaaaggg

SEQ ID NO: 40448 - DNA, 353 bp, Oryza sativa
  Clone ID: uC-osroM202028e08a1
ccccaaaaatggaacctttgcccccccttttttattattattaaccccttgggcaaacaagcgtgcaaaaagttggggctcggggataataatgaacaaaatgggggggttttacataggggatgaaacctttaaacaattaatttggcccaaaccggggaaattccttggagttgcaggttttaaacccggggtttattccatggaaacagttttccccgagctgaaattacctgcccaattttttgccgtcccctggccaaaaagaagtttccggatctccggaaattttttggggaaaaaaaatttcaacctggaataaaaggggttttaacaccaaatttttccatttt

SEQ ID NO: 40449 - DNA, 476 bp, Oryza sativa
  Clone ID: uC-osroM202028e08b1
tcgcggtggtggttcgccggagcgcagcagcagcagcagcaaaaggccgcgagggccgccgtcgggatccccgccgccgccaagatgaacgacgccgatgtcgccaagcagatccagcagatggtgcggttcatccgccaggaggccgaggagaaggccagcgagatctccgtctccgccgaggaggagttcaatattgagaagcttcaacttgttgaagctgagaaaaagaagatcaggcaagaatatgaacggaaagagaagcaagtcgaagttagaaagaaaattgagtactctatgcagctgaatgcttctcgcatcaaagtgcttcaagctcaggatgatttggttaattccatgaaagaggatgctacaaagcaactccggcgtgtcagccacaaccaccatgaatacaagaaccttttgaagaactcgtcggtcaaggtttgtttcggttgaaagagcagcggtacttt

SEQ ID NO: 40450 - DNA, 421 bp, Oryza sativa
  Clone ID: uC-osroM202028e10a1
atcatctcaacttgtacatatatgacgtggccattgatttgttgttcacacagtttggcgagaagaatattgcagtttacaaacagcaacgaaacaaaactatcatcgcaacttatacatatgtgacatgtcataattgataacaagaagtgaggctcaatgtgcatagctgaaataattttgcacaccaagtattcaaggaaaaggagggaatcaaattaaaaaaaatccatcatttgcccccctggtgtgcaaaactttccaacatgtttgaagaatgcagtttgaagtacagcttccagtaccaacatgtgaagactgagccaaaactgtacaattcaccataaacccactctttcaagaatccaaaccatggcaaaaccagctgatcgatcaatcattcactccggttttgatcatg

SEQ ID NO: 40451 - DNA, 369 bp, Oryza sativa
  Clone ID: uC-osroM202028e11a1
aaaccaaaacagttactatctttcttatcattcaggggaactccaaatttccctatgctatctgcaaacgggtttttcagaattcagagaaagggataacattacatttatttaatctgccacaaacttaaaatcacaaatccacaaactatcttagtttgttccttttttccccttatgtccaggtccatccaaatggaaatttcatgaatggagtttcattccatgttggcatgatctgcttcctggagacctggactgaagtccccccctgcattgctgcctgaacttctttggtttctgacagcaagagtggtttgcgcttgcaaacaccaaattaaggcacgagatgaaaggatttgaatcaat

SEQ ID NO: 40452 - DNA, 293 bp, Oryza sativa
  Clone ID: uC-osroM202028e12a1
gcgcgagctgcggcgggaaggcctcgacgtgacggtgctcgagcagctcgccggcgtcggcgggcagtggctgcacgacgcggcgaccgacgccggcgacccgctcggcatggcccggcgtgcacagcagcgtgttcgcctcgcttccgtatcaacggtaccgagggcagtccatcggctttttccgactttcccgtttccgaacccaaccaaacgacgcccggccggccgaccgcgccggtcgggtaccccgtaacacggccgagcctcattcaggttacattcaggggact

SEQ ID NO: 40453 - DNA, 337 bp, Oryza sativa
  Clone ID: uC-osroM202028e12b1
aatccgagaagaaagatggcggcatatttatagcaattccgaaaataaaaaggttcagtttttagtacaatgaaaaatcctcttgagacagacaggccagcattttttttgttgaattgtcgtgtatttatttggtttgcttcatcttaacctgaatttattggagtccaatccaagtgcttttatttgtgggcgtcgtcgtcctcctcggcgggagtccaaccgtgccggcgcacggcgtcgcggacgaggtcgctgtcgtggtagccgtcgcggaagttctcgatgtcgtcgaccatgtcggagagggatgacacaaagatctccttttttcact

SEQ ID NO: 40454 - DNA, 413 bp, Oryza sativa
  Clone ID: uC-osroM202028f01a1
atgaacattatctcgttccaaacctcacctcctacactccctccccacccaccacggggatcagtgatgcgcatcatgcatcggacggtgtataattgtacacgtggaaggtggcctgtggggccaccgcggccaggaagatcctggccgtcgcttcctgcgacaccaaccccgcttccttctccacgagcgccgccgccaccacgtctccggcggcgccgcccccggcggccaccatccctatgatggccgcctgcacggggcctagtgtcggattatacgccgcggactccaggcatcctccggcgtacaccttcccttcgccgtccgccacggcgaatcccgacgggcactcgctatacggcgcatgcgccgcccgcgcgggcgcctccgctgccttcctcaggcgcgcc

SEQ ID NO: 40455 - DNA, 387 bp, Oryza sativa
  Clone ID: uC-osroM202028f02a1
atgtaacatgatgttcttgttcatcctctttttttcttttccaaaacaacagatcaaatgaatgttgctaaaggaagaagaaggcgtaaaaagaatttcaaaaggaaaaataagttaagcaagagaaggcacagatagatacaccaacctatctatctaccaccaccaccaccaccaccttgtgggcttgagctttcatcagttcatcaagctctcatgctggcggcaacctgtcgagcgcctcctgcaatgtcttcttgaacctgtccatgtccatcttgatgttctgcttgtccaggtacgccgtcttgagcgcgtcccagccttgcttgtgcacggcgtagggatcagtgagcacctggtgaatgcgcgggtactgatcgatca

SEQ ID NO: 40456 - DNA, 271 bp, Oryza sativa
  Clone ID: uC-osroM202028f03a1
acttcggctagtagcattgcaacgcaaacagtatgacaaggtaccacgcattgtttaagagctaagacaaagacaaaactgatgcatccaacgtaccaaaaagaaagcgaacagcagcagtcagatagctatgagaagagaactaggagagggataactagaagggacagaatggcatccatgggtccatgacgtttagtcgacctgctccatcttgctctcgccggcgtggtcctccagcggcggcatgtcaagttgagcctaggcggac

SEQ ID NO: 40457 - DNA, 433 bp, Oryza sativa
  Clone ID: uC-osroM202028f04a1
acgcgcgcagcatgcattttatttaggcacggtccacaattcatacatgtatagtggatacgtctcgtcggcagacactcacggtatagtagggtagtcgtgtgtacagtgatatagtcatatctgcgcgtcttttcatgccgttcgttgacttcgttcacagggtcagggtcgggtaggcgatatcgagtgtgacgccacacaggccggggccaccgacgtcgcggagaatccggatgtagccgcgctcgccccatgactggccccatgagttcttgatggtccagtacttggcgccggaagacgcttcggtgccgtacccgacgacggtgacggcgtgcgctaggcgcgtgccgcacgggcccgtgtaaacgccacccttggagaactgcatcccgctaccgaccttgatggccacagccacgggctgccg

SEQ ID NO: 40458 - DNA, 387 bp, Oryza sativa
  Clone ID: uC-osroM202028f05a1
aaaccccacagcctacaatatcttatcaggaaaaaagactcagatcttcaccaacaatacttcaaatatatccttcatggccagcaactaaaaatagcatttacatgatcaccaatgaggtgtatacagctcctgccgtgggtccacagaagttcatgtgatctgcagttgaagtggcagccacgaaaggatctaccaatcttaaaatctggagaccaatatctttcatggaattccctcaaggaaagggttccactattagactggaaaaagggaaacatatcaaatcatgaaaaaggcattatctgaaattggaatagcgtatatctttttaagatttaatttaatcccggagtccacacttttttcgtgaagcttcaaattaat

SEQ ID NO: 40459 - DNA, 472 bp, Oryza sativa
  Clone ID: uC-osroM202028f05b1
tcgtacactccaccgcagctcggtcatccttagtcgcacaccgatacacgaaggcgaggtcggagcccctggtgccgccacgagcgagaggcaattcgccgttgcggccgcgctcgtcgtgcaaataccggaacgcaagtggtccctttcctgccgccgcaagcgagcagttgcgtcgctacatgcacccccaaggtcttcctccaccgatctgtcctgtaagtacaacgattggctacaactcttgttcatcgcaatcccttttcttgttccttctagctttacaaattttgagtgagattgaaggcgacctgtccgggttcaggttctgcttggcgcatatgttctgcatgaatacaatacgcagaacaaactcatgattggttcctcggccttgctaggaacatgcaaatgctgatgtgatgttttggttgctcagatccatcagtgggatttcatcaacgacaaaaca

SEQ ID NO: 40460 - DNA, 443 bp, Oryza sativa
  Clone ID: uC-osroM202028f06a1
accaaacaaatggacaatgcgatagctaactacatagatggacgaccggcaatgaacgccgaacagcatgacggttctgaaggcacagaactacggatccatggagctacaaacaaccccatgtacggattatcatcactacgcaattatctcggctaatgaccatccacactgagattgaggacccgaaactttagtcatagtacgtgctcattctgtataaggccaaatgctcttgaaaaaatagttccccttgaaaacaaatactcttgacaaaaaaaaaaagaggtgacctcatgagggatcaccaaccgcaggcgggggtcatatgcgacaagaccataccgggggaaaagccggcgcctttggccgttttaacaagtgcacggtcgctttcaatggaagaacagcatacagagctttcccttttttcttgagaaaat

SEQ ID NO: 40461 - DNA, 248 bp, Oryza sativa
  Clone ID: uC-osroM202028f06b1
tatgtatatttttttttttttttttattttgtaacccgagatagccgaccacgtcacttgcatgtttgtgcttgagctgagcccgccaacgccgcgcgccatgcgcccaccgagctgaggcacacgagacgccgagaggcagggcaaggcaagaacgccatgcgcgcgctccggccgccgacagcaccggctccggctgtgacgccgtcgccggagccattaccaaatgctgagatgtttgaaggggg

SEQ ID NO: 40462 - DNA, 460 bp, Oryza sativa
  Clone ID: uC-osroM202028f07a1
gaagaaggcgacaaatgattgattttaatatgttccgggctccatttggaaattggaatcatcagttctagacatcatattatagctacagaataaggtcaattctacagcgactgccatcattcatcatagaactgttcttgcctagttgcctgccattagagatttaatagagctaaagcagctatcatacagcatgtccatgatcagatggaatacaacggatcatctagctatattattgactgagttgctactgattcggacaggactagtgaagatcgcatggaatgcaggcgatcacgaatggtgaccctgcagtcttaagggtgcttagtttggattctggtctacatctcagtagtccagaggcgctacagatgcaaagtttccggcgatattctgcatgttgtggcttgcagaatagtcctcgcaagcattgctctgctgcatccttgct

SEQ ID NO: 40463 - DNA, 328 bp, Oryza sativa
  Clone ID: uC-osroM202028f08a1
gccgatcaaggaccccaagtccgtcaagttcaaccttcctcctcccgaggatgacttcggcgacgatggcagcgagtttgatgacgagttcgacgagttcgatgacgaggacgatttcgacgacgacggcctcgacgacgactacttcgacgatcccaagatgatgaagcagatggccatgccgccaccaaacgccggtggtggcggcgacaagaagggtggcaacaacggcggcggcgccggcaatggcggcaagaagggcggcggtggcaacgagatccccgtgcagatcaaggggaacgccaacaacgccgcttgcggcggcaag

SEQ ID NO: 40464 - DNA, 354 bp, Oryza sativa
  Clone ID: uC-osroM202028f08b1
ggcaacacattttgctttgcacattgttcatctaccatgcatcaccacaacaccttatggagcaagaaggaaaccaccaccaccaccttccttctggaattataaagcaccatcatcatcatcatctcttatgaaaaactatagataattactatacctaccttcgccttcaaggaagttgagttctcctttaaaagaaaggtgaaaacgagctaagtaaaaaagaaaaaagaaaaagaagaaaaaaagaagagcgatctaaatgggactcatttcccatggtgtatactggttgactgatcctgagagcatctctcaaccatcatgatggcgatcacctgtgacctgatgagc

SEQ ID NO: 40465 - DNA, 293 bp, Oryza sativa
  Clone ID: uC-osroM202028f09a1
caaagaaactatcaattttttttttattaaacaaagggtagaagcagtgttaagaagatccctcagccaccaatgggaatcataggtctttttgccgttttagcattatcaaacatcccagcatgtttagctttcttccttttaaccgcagcgcttattatttctctgagtccagcatcatcaacaccagttcgaataggttttttcaggctcacctttggggggccaaataagcccactttcaagttgccatcagccaatagtcgaaatttattgcacccagcccaaaaatg

SEQ ID NO: 40466 - DNA, 312 bp, Oryza sativa
  Clone ID: uC-osroM202028f09b1
gtgctggttgcaatagattacgactattggctgatggcaacttgaaagtgtgcttatttggcccctcagaggtgagcctgagagagcctattcgagctggtgttgatgatgctggactcagagaaataataagcgctgcggttaaaaggaagaaagctaaacatgctgggatgtttgatattgctaagacggcaaatagacctatgattcacattggtggctgaggtatcttcttaacactgcttctaccctttgtttaataaagaaagaattgatagtttctttgaaaaaaaaaaaaaataaaaagaataa

SEQ ID NO: 40467 - DNA, 444 bp, Oryza sativa
  Clone ID: uC-osroM202028f10a1
caatacaaaaataattgaatttatgcatatgactatatgacagctataaagatttagtatatttttgtactgttacattgatcatcatgatcggtgcaaacttcgtcatgacatcaagaattgagatctactatagttaaactttacaccaccaccaacagaatcagcccaatcttatgtatctctacgatcatctgcccttggagctcgtcctcgcactatcgctccttggagaattcccctgtccacgcaccagtgaggagctgttcctgggctccctcgacttgctcttaatcaactcgatcttctcgagagcctcaacgacttccttcatggatggtcggctcttgggatcaccagacagacacttgagagtgagctgagcaccttggagggctcccctggaatgatactgccccttaagacgactgtccatcagctggc

SEQ ID NO: 40468 - DNA, 475 bp, Oryza sativa
  Clone ID: uC-osroM202028f11a1
ttttttttaataacacttgtatattgccagtgatatgccaacaaaatataatgacaacttccaataaagtccgaacagcatgatgcttctcaagccacagaaatacggatctctggacctacaaatcacgccatataatgattataatcactttgtaattctctcgcctaatgaccatcccgactgagattcaggtcccgaaacttcaatcatcgcacgtcctcattctcttcaagtccaaatcctctcgaaaaaatagtccccttcaaatcaaatactctcgacaaaaaaaaaaagagttgacctcatgaggcatcaccaatcgcaggcggatgtcatatgcgacaagaccataccggcggaaaagccggcgcctttggccgctccaacaagcgcacggtcgctatccatcggaagaacagcatacagagcttttcctctttatcttgagaaaataatcgtttatacatacagg

SEQ ID NO: 40469 - DNA, 208 bp, Oryza sativa
  Clone ID: uC-osroM202028f12a1
gcggtttgggccgtccgcgccgccgccgccgccggcgatgttgaggcggtagcgccacggcggggacgcggtggagggggcctccacggcgaggaggtggcgctcgaagccgaaggagtaggagcgcttgaggaggaaatcgtctctcgggccgacggggttccgggctttgccggggttgatcctccgccggtcgcggcggtatggg

SEQ ID NO: 40470 - DNA, 318 bp, Oryza sativa
  Clone ID: uC-osroM202028g01a1
ggccagagaaggggagtctttggttttgagaaagctaagtattcagaatccgggcctcattttattcgggaaaaagatgcttaggccagttccaggtcacctgatggcaaggtcacaagttcagacagttacgcacacacatacaattcttttggacaaactgtaacaagatgcaagctcccttgagattatcttatctcactctacgatgactgccggagctctgggcgcacgaaatcggcgttggcaggccacggcgatgtccacggtgggccgcagctcagcgcacaccttgattgcgccatggacggggtcgga

SEQ ID NO: 40471 - DNA, 438 bp, Oryza sativa
  Clone ID: uC-osroM202028g02a1
aaatgaagtggggttaataattaattaaatgggccattatatatggacaaaaagaagagggcgagatctcatcaaaataaacccatacagctcatctggaaaggcatgtactatccacagaagacttggttttcatcatatattatacctgtatatacaagggcatctctctttatgtactcattctgattgtttaacacaaggctgagaaaatttgatacacttggaccttgcatttcaatctcatcaatcccatgcacatcctctgagaatttgagcaagaccgtcgcgttgctcgaaagtaagctgcttcgggaacgcgatctcaaactttacccttagatcaccccgtgctcctttttgatcggcaattggcattccttcccctttgatgatcttctcatatcctgggcagatgatcttatcctgaaatgagca

SEQ ID NO: 40472 - DNA, 421 bp, Oryza sativa
  Clone ID: uC-osroM202028g02b1
tggaaccctcccgagctgtaccaccgcatcctcaacatccccagggagacctcgccgcaggaaatccgcgccgtctacaagagcctcgtcaagaaatggcaccccgacaagcacccgccgtcctccaagcccgaggccgaggcccgcttcaaggctatcaccgaggcctacgaggcgctccttgaccagcaggagaacagggcggtgttcggggtgtgctgcaacgacggccgcgcgggcgagaaggccatggcgtgcggcgtggtcggcggcggaggggcacacatcgcgaggacgcgcagcgacgacttcggcgcgaggatggcgcccggcacgccggcgagggagttcaagaaggtgtacagctccggcaactccggcgggcggcgcgcggtcgccgagttctccagctcaatcatgc

SEQ ID NO: 40473 - DNA, 175 bp, Oryza sativa
  Clone ID: uC-osroM202028g03a1
ttgttttggcactgatattatgctatattaagttgtgatgtcacttatggcagtactttacattatacaagcagcttatttctgaagagccgctaggctgtagaattgctcctttcttactcatgaggggaggatacagcactcacgttccactaccttaccctttttctaagaa

SEQ ID NO: 40474 - DNA, 429 bp, Oryza sativa
  Clone ID: uC-osroM202028g04a1
gtccggcaacacatcagagttgtcttgcatttctttagaagggccttgtcaccggggacagttcctatcaaaaagggtgataagcagttgatcacatattcagtcatcattacgatgcaactattcggaccgagattcatccaatacgccataatgttacaggaaacgaactaatgtagctgctccactattacgaatttgatcgaacggctgaacggctcctgattcacctcacacacttgtatgccaactcgatctttgccacccatcactagtctgctagtttgggaacttcattttgtactgctgagcagtcataaaggtcgctgtaatcatctttcctgcgaaccatctaccatgcagtgcgcgttgagcagctgtcgcagctgctacactgtcgaaatgaaagtacacaaagccagcagtatt

SEQ ID NO: 40475 - DNA, 409 bp, Oryza sativa
  Clone ID: uC-osroM202028g04b1
ttggtctccacgcgagtcgacgagcggcgccgccatggagttcgacgagtacgagtacctagagaagacggtcgagccctccgcgccgtcgaccaacggctccggcgagaaggaccgcgccggctcccgccggcgctcctccggcggcggccgcgacgacgaggagcgcgggtcgaagcgctcacgctccggggaggaccgggaccgggaccgtgaccggcaccgaggcggcggcggcggccgggagcaccgggatcgggatgacgggaaggagaaggagaggagcagccgcagccgcggcaaggatgcggagaaggataggggcaaggatggggagaaggataggagcaaggaagcggagaagggaaggagccgggacagggacagcgagagggcaggccccaggaga

SEQ ID NO: 40476 - DNA, 325 bp, Oryza sativa
  Clone ID: uC-osroM202028g05a1
atgaacattatctcgttccaaacctcacctcctacacttcctccccacccaccacggggatcagtgatgcgcatcatgcatcggacggtgtataattgtacacgtggaaggtggcctgtggggccaccgcgggcaggaagatcctggccgtcgcttcctgcgacaccaaccccgcttccttctccacgagcgccgacgacaccacgttgttcggaggttgccgccccccggcgggcaccattccctatgatggcccccctgcacgggggcctagtgacgggattatacgcccgtggactcccaggcatttcttcgggcgtacacc

SEQ ID NO: 40477 - DNA, 367 bp, Oryza sativa
  Clone ID: uC-osroM202028g06a1
ccttgttatttgggaacagcccctgtgaacctgccacatggacctattaggggtcttgtaatggccagggttgaggatggcaactgcttttacttgcgctagatagtaatacatgaaggaacatgcacaacatacatgcctgatgtataatacttaaagcctgaactgtctacattaattaatcactcacataaactataaactgcttagtggaagcattacaatccatacaccagaattaccaggaacataaacgaaattttcaaggggccatcagagactgaccgtgcatggggctgccttgggtggatcagcagcaccagctagacgggtaccaggatagcggcctccaccggctatggctaag

SEQ ID NO: 40478 - DNA, 388 bp, Oryza sativa
  Clone ID: uC-osroM202028g07a1
gacacattccatcacaatacaattcactgcattgcatccctatcatttgagattcatcaagacaaattttcatcacaatacaattcaccaagcatagaagagatgccaaatcccagacataggcatatattttggtaaaaattggttgtaatgaataagcatacaagctgatcatggtccatgtcacttaaagcaaatactcaaatctttgagacaatagctagcaccagattatttagttcattggtcctagaacatgcagttgaaacttgagaatacaccttttctgatcagctctaatgatgctacttatattgcttcataacttagcaagtcagcacaaaagtggcccttgtcgttgtcatcttcatcggttttagaaatattc

SEQ ID NO: 40479 - DNA, 418 bp, Oryza sativa
  Clone ID: uC-osroM202028g08a1
cgccgttgccgccgccgccgtcagctccgacacgttgaacacttcctggatacctccgggtccccacagaggtagggcgaggttgcatgagccgacaggaagccggagcttctcctccagccgctcgacgtcgaccatgtacatccaccactcgccgtccctccccaccgcctcgtcgcaccggaacaagtccatcatgggctcgcactcgctgcgcaccaccacgcgcacccgcccgccgccgccgccgccgccggcgtcgtgccgcagccccttgcgcgccgccatgtgcgccgtcacgaggtgcacctgcagcctgaacacgtcgcggttccacgcggcgtccgaacggttgcacggcagcgacgccaccaccacgttgacgtcgccgtaccgggagaagtccggcatggggagc

SEQ ID NO: 40480 - DNA, 363 bp, Oryza sativa
  Clone ID: uC-osroM202028g08b1
ttcagctcgcgacgcgcgccaacctcgccgccgaagcacgacacgaggacaagctagcccggcgcggtgtgccattggcatgggggtgacgggcggcgccggggaggccgtcaagccgtcgtcgtcgtcgtcgttgtcgccggtggcggggctgatggcggcggccatcgtgaagctgaacgcggcgttcctcgccttcttcttcctcgcgtacatggcgctcctcctccaccccaagtactcctacctcctcgaccgcggcgccgcctactccctcgtccgctgcaccgccttccgcgacgcctgcaccccggcgacgacgaccaccgcccagctctcttcgaagcttggaggcgtggcggc

SEQ ID NO: 40481 - DNA, 461 bp, Oryza sativa
  Clone ID: uC-osroM202028g09a1
aaaactatcttacatcaattttcttgaggtctggaagcttgcagcttccataaaattgtctatacacgtacatcaacagtacaaaatctttgtactcaacacaaaagttcagaaaaaaaaaaaaccatgaacttctctactttgtagctgaaggagcctctccattgttactttgcctttttttatcaacaaaggagctaatcaatgtaagaaccaattctgttgggacatacccatcaatccacattactcaccatcataatgtgaatcgattcatcatcatccatccatggatccatgattcatccagatgatatttattcgtttcttggcatcaagaatcggatgatttattggagccagcattgaccaagcttgccagcttcactttgggcttggagtactcaccactcatcgggagcttagccgcgaggccactgccaaaatcagtgaagtgcaca

SEQ ID NO: 40482 - DNA, 145 bp, Oryza sativa
  Clone ID: uC-osroM202028g10a1
actgaagccacaaacgggcttttccttcagtaaaggtcaaaaaccccatacactgctaatctgcgaactattattgtacagaagggaaaaaacaatttctacattctagacagaagggaaggaatgggggttgttggtgctgctt

SEQ ID NO: 40483 - DNA, 244 bp, Oryza sativa
  Clone ID: uC-osroM202028g10b1
taaatcccttctccctcccctctcgccgccctcctcctcctcctcgtcgccgtcctcctcctcctcctcgattcgaggggtgccgccgccgccgcagctccagcatccgcgagaggctcgcgttggggatcgccaatttccacgccacggtggccaatcccccgcggcgcgcgctggtgggcgatgcgatcggatgaggtgttggcgacggcggcggcgctgcgtggtggtggagaggagaaga

SEQ ID NO: 40484 - DNA, 449 bp, Oryza sativa
  Clone ID: uC-osroM202028g11a1
actcaaaaagacaatttgtatcatatttccggaggcaatttacacaatcatgtgtctgttacattttcatagttatgtcgcctgacaaataaacaaaatcaagcttttgacagccctattccacctttgtacctgactgcaatgaatgtaatagaatgaaaatatacatgtatgcaaccttggaaccatatggaagaactactttccctgctccatttcagtgcactatcgtgatacacctctacaattacaacggaagaagtgactttctcatgaagattggaagatcggttggtcagcgaaaggaccatatacccaacctctggcaatgtgaccgtaagccgcctctgtcaggtgaatgccatcccagctccaatgggttgatggatcatcacacgcggttgcaccagccttaccacatttggctgtgacattgaagttgtaagcgg

SEQ ID NO: 40485 - DNA, 456 bp, Oryza sativa
  Clone ID: uC-osroM202028g12a1
gaaacataaatttagttctctctactgactaatacacccatctttcatttaggcagaaaaataataaccgatagttagccagcaagcctactggctaccaacagagccttcagttaaattattcagatttcagaatatgcagaggaacgaggcctccccgttttggttcatttaaacgacggaggagaggaatttatccagctgttaaccaacgcgaaagcatcaacactgtcatcgctgacattctcgtccatattcattagtccagtcaagttattgcctccagaagtagtttcagctattactggtagagcctgagatgattgagcaatacagtacccaatagcagtcatgtcgatctgtctcatagtacctgcttgattaccttgatagccattgaagaatgatggatcaacaggaatttgttctgatcctataatgaacccacaagcacta

SEQ ID NO: 40486 - DNA, 261 bp, Oryza sativa
  Clone ID: uC-osroM202028h01a1
acaagcacaaagggccgcagtatgcagacgcagctgcagcagcagcgaagaatattgatagagtaatagtagaattcccatggtcgtacagctccaaataggcggatttatggggggcaaagattacatctttcattgagtttgcacaatcaacacagcatgattacacaataaatagtaatctttacacaaaaaccaccctgacctattgcaatggggttgcaatagttcagcaggactcaccagcacaccacacaaaga

SEQ ID NO: 40487 - DNA, 260 bp, Oryza sativa
  Clone ID: uC-osroM202028h01b1
ttgtttggagaggtagagatgagagcacccgctggccgccgtgctcatcatggtgctgcgacgttcgcacgggagctcacaagcgggaggctaggccagaatatggcacccggagcatatggcgacactgcacgcggtggacagagcacgaaaaagaggagctggcgacgcacagtgcgagggagaccaacgcaggcgccgtggccctgaaagttctttagtgcctgcactgcggaggagccaacagccatgatttgtac

SEQ ID NO: 40488 - DNA, 242 bp, Oryza sativa
  Clone ID: uC-osroM202028h02a1
ggacaagctgacaacactgaaacaaataaccagcgcgtccatgtttcgctaacagtagcaagaaaattacaaatatgtacagctctgagcaagctcgcatgagaaacgcaagtttccatcactcctacaatcctacacgatcctgtgcactaaaattctctcaagtctacgaaaaactgtacagatgcatcattcgcagattcagcacaattcaagcctttaaggaccaccaaatcaccacc

SEQ ID NO: 40489 - DNA, 386 bp, Oryza sativa
  Clone ID: uC-osroM202028h02b1
ttgggtggcgaggaggatggggtacctgccgtcgtcgctgggcagcaaggcggcgcacttcgtgtccgacctcaccaccgtcatcctcaacccaatctccgagcgcgagccttcctccccactccccgaggtggacaaagacgaagaaaaatcagaggatgacaaagattctgagcaaaattctgacacccccgatggccctgacacatcttcctttagagcattcttgatctcattcctgtcatcatctggttctagtaatggttccatggagataattcctgatcagaatggggaattgggatacccaactttaacaccaatggggaagtcaaaaaagggaaagtctgggctcctaagtagaggaaaacattccattggaaaaa

SEQ ID NO: 40490 - DNA, 267 bp, Oryza sativa
  Clone ID: uC-osroM202028h03a1
atcccgggctcctcgcccagcaccgacgggcggtcgcgccggagctccagagcgtcgcggaggaagcggttgtagtccaccatggtgtagttgcgcgggttgcgggtcgggtgcggggagatgatgaggtcgcggtcgcggtacagaccgaggtacccctgcgggaagcagtgcacgccggcgtcctcgtcgaagttgatgacgtcgtagttggacagcttgcggagcagcggcgtgtacttttggacccaccacggcttggagctg

SEQ ID NO: 40491 - DNA, 433 bp, Oryza sativa
  Clone ID: uC-osroM202028h03b1
ttttctttgacttcccctttcctcctccgtgcgcacgctctcctgattcatacagcatttcgtcggggatgacgtcgacggcgtactcccggccgtcgaagctgccgggcggcggcaacggcagcgaccgcaggctgccgccgcggctgatgaggggcctcaccaccaagatcgagcccaagaagctcggcgtcggcctcctcgccggctgctgcctcgcgctcctcacctacgtctcccttgccaagctcttcgcaatctactcccctgtgttcgccagcacagccaacacatccgctctgatgcagaactcgccgccatcctcgccggagacgggacccattccgccccaagaaactgcagctggcgccggaaacaatgacagcactgtggaccccgtcgatcttcctgaggacaagtcgctggtggaggc

SEQ ID NO: 40492 - DNA, 395 bp, Oryza sativa
  Clone ID: uC-osroM202028h04a1
gtcattaggcagcgacgttggtaatgccccaggagcggtcggtcgaggtggtcggcattcagggaagcggaagcagtcgacgaggtggtcgatgacgatgccggaggcctgcatgaaggagtagacgatgacggggccaacgaggcggaagccgcggcggacgaggtccttgctcaccgcctctgacttgggcgtccggaacgggatgtacttgtggtgcttgtacctccccaccgtcggccggtggttcacgtgcccccatatgtatccgctgaacgacccaaactccttcgccaccttctgaatgcatttggcgttctcgatgatgcaccggaccctgcactcggccagcttgagctccttgttgccgctgatctccgggacgtcgttctcgt

SEQ ID NO: 40493 - DNA, 455 bp, Oryza sativa
  Clone ID: uC-osroM202028h05a1
gtacaaaccaaaattcatttcgactggactgagtccagaaaagcatgatattttgactcgagccatctcagcatgacagacatcaaatgatggatggaccaggggaacataaacacccagaggaccaggttttcatagacttatttgccatcattaacaagcacgaccacgataatggtcctccatatatgacctcatgatcgatgccataggactataggaccagtaattccaataccccgtaaatggaggccacatatgaagagtacataaacttaatatatagctttgatcataagcagcgggagccgaacagattcacaatctaattgacaaacacaaacaccgcagtataaaaagggaatcaagcgagccatgatatgagctgcaccctatcatcctccgggtaagcattcatgaacgacgacgtgattaacctgaaccaagaaatggca

SEQ ID NO: 40494 - DNA, 415 bp, Oryza sativa
  unsure (1)..(415): unsure at all n locations
  Clone ID: uC-osroM202028h06a1
atcaaaattacatgataaaattattattgtcttgaattatgtaaacgatgataacaaatccttttccagctacaaaagaaccagcataacaacaaagaattataaagttgcttaagtaatctctcccttcatctcaaaaagagctatatctagggggcctaggccacagcaacactttcacttaaagggtactttccatcctgcgacacacaagctcccaggatcaatctacttggccttgccgttctcgacagcagcagtcgaggggttcagctcatcccaggcctcgatccaggtgaccatggcatcggcaagcttgaccaagtaggggttcgatcttgccgagcttctccctgacctgctcggcnagggagaggtagcacttctggacggtgtcgcactccttggggatggt

SEQ ID NO: 40495 - DNA, 446 bp, Oryza sativa
  Clone ID: uC-osroM202028h06b1
ttcgctcctactcctcttcctccgcgcgcgcgagatccagggagagggagagggagagatcatggcggggacggtgacggtgccgtcggcgtcggtgccgtcgacgccgctgctcaaggacgagctggacatcgtgatcccgacgatccgcaacctggacttcctggagatgtggcggcccttcttccagccctaccacctcatcatcgtgcaggacggcgacccgaccaagaccatccgcgtccccgagggcttcgactacgagctctacaaccgcaacgacatcaaccggatcctcggccccaaggccttctgcatcttcttcaaggactccgcatgccgctgcttcggctacatggtctccaagaagaagtacgttttcaccatcgacgacgactgcttcgttgccaggacccatctggcaaggacatcaatgctcttgagca

SEQ ID NO: 40496 - DNA, 257 bp, Oryza sativa
  Clone ID: uC-osroM202028h07a1
tgttggcctcttttttttggccgccgcccttttttttttggtttttttttttgacaaggacaaaggccctcaaaatgcagacctatctgtagcagcagcgataaatattgatagagtaatacaaataattccatggtcgtacagctccaaatgggcggatttatggggggcaaagattacatctttcattgagtttgcacaatcaacacagcatgattacccaataaatagtaatttttttacacaaaaaccaaccc

SEQ ID NO: 40497 - DNA, 157 bp, Oryza sativa
  Clone ID: uC-osroM202028h08a1
tttcggccgcccccccaaattttttttttagcataaggcacaggctatctaccctaaatcctttttcctatgcttccacatcttttttcccgacgcatgctaattgcggcagtctccagtttctcacctagccgcttttagttcacccatgttttca

SEQ ID NO: 40498 - DNA, 220 bp, Oryza sativa
  Clone ID: uC-osroM202028h08b1
ttctctttctctgataataacttccccccctcgtaggttctcgaggacggcgcgcgctttttcgcggaggagacatccgcaggatcctaggatcactgggtagcttcggagcgtgatatacgacagcaggcggagagctaacgcggggatgatgagatcaataacgaataacatcgagcccaactagctagccggggttccaaacacaggttgttgtttg

SEQ ID NO: 40499 - DNA, 264 bp, Oryza sativa
  Clone ID: uC-osroM202028h09a1
ttataggcgcgcccattctcttttttttttttttattattttattttttttttttttttatttttatatttttttttatgaagtttttttattccacaagggaaaaaaaacgcgttttaaactcaaaaatacggggaaaaagaggaaaaaaggtcaggacaaaacaaaggttcttaaactaaagaagtttccccttcataaaaacttgaataaaaggaaaaaaaagggaaacaccaatttgtttaaataaggtttttaataaaa

SEQ ID NO: 40500 - DNA, 352 bp, Oryza sativa
  Clone ID: uC-osroM202028h09b1
cgtcgtgccgctgcgtcgtcggcgacgggatcgtgggctcgcggggagggcaccgacgtcgccggcgacgacggacggatctagccgtctacacccccgatccccgccctctctctcgaggcgatcgcgccgagctgagctgaggtgagggtgtagcttactatcatggcgtcagccactggagcgtctggatggctgaggggtaaggtgaagggtgtgacttctggggactgtcttctcatcatggggagcaccaaggcggatgtcccgccgcctgagaagccgattactctgtcatacctcatggccccaaggctggctcgccgtggtggagtggatgaaccatttgctt

SEQ ID NO: 40501 - DNA, 359 bp, Oryza sativa
  Clone ID: uC-osroM202028h10a1
gctgcaatgcatggttggcttggttgacagcacagcacagattttggaattaaaggagatttacgtaatttgtttgtacagaagaagagagtagtaattgattgggggtggaagacgacacaggtagcagctgcatggagtaattaatattctagctatatatggatcgagacgggggacgaattcgattattgagactgggagcagacgatttgatatgatatgatcagtagtcggcggtgggcaactgttcctgcgggcgctggccgatgaaaatgattgtctaaatgaacgcggcgaatgctgcgccgacaaaggggccgagccaatatacccaatggtttgtcccagacttcggt

SEQ ID NO: 40502 - DNA, 495 bp, Oryza sativa
  Clone ID: uC-osroM202028h11a1
gtaatataattaacgatcgatttattggactgatgtatatatgaacacacagattgacctaggagtttctcggtcatcgatcaagtacatatacgtggccagcgcgacaacaattggccgatatgatcgaaatcgataagacgataaccgagacacagccgacacacgacacaacatgatcctcccccagagacccatgatcagggacacatgcactaacgatgcatgtatgcatacatgaagcttggggaggttaattcgttattctttgcacacacacatatgattatattattattaggtgaaaacgaccgatcgatcgcgattgatgacgagccgagacgacgacgtgatcgattgatcgattaggcgccgaaggcgaagcacttgctggtggtgaagacgcaagcgaagaagcaggtggggaagcctttgattcccttggggaagcacttgatcccgcaggtggcgatgcacgtcttgcacttgtggtgc

SEQ ID NO: 40503 - DNA, 463 bp, Oryza sativa
  Clone ID: uC-osroM202028h12a1
cagattcgttatgaaacaaagatggcatatatagcatcatatacaaaattttctttcgaatttctcctcaaattgcactccatgagcaaatgggaggctcataacatacaaaaattgatgcttaagctctgaccaaaaaaaaaagcatcataattggtcccgctgctctaatgacgccgtagagaagatgaagttgtgtggtgagtgcagttttgctttcagatagctacaatgttcaaaactatttgatcttgagcatcacgctgtcgtgcaacatttccaagagcatagcacttactcaagaatatagcctgtgtttggaaactcctgtaaccacttcaccaaaaagaaatttcaatatcttcagctatctacttttaagataacagagatcttgtagccagcctactttgcgacaacattctgctcctctaaacctccagttgccttggcatgggcaaca

SEQ ID NO: 40504 - DNA, 478 bp, Oryza sativa
  Clone ID: uC-osroM202029a01a1
ttttgttttgtagaaacatgtggtttccatgtattttgaggaacatgcacatatcaacatacatgtaatacgatgttgaattaagcaagcagatttaagcatgcagagtgcactgcttagcacacactggatgtgttgctagctagctagctccatctagttccctctcttctcatcatgattgacacttgataaaattaagcaagatttagctagctagctgagctgatctgatcaccatgcatgcatgcaagcaaggccaattcaatttcaagctcgccggccatacaccacacagtacatatacggggggtaaaacaaaaacaaaaaggaaatcatacacaacattgattcattcatccattctgttaattaattgacttgaggttgaggagcctatatatacgtgcgtggcatgcatgcatagatgtcggacggaggtcgaccacgaccacgacgagcctagcaaggttggatg

SEQ ID NO: 40505 - DNA, 363 bp, Oryza sativa
  unsure (1)..(363): unsure at all n locations
  Clone ID: uC-osroM202029a01b1
attcatatcacggaggcgcggcggaagctgttcctcaagagcttcgcgtacgtggtgacggtggggatggtggtggcctacatggtggggctcaacatgtcgtggacggccatcaccacggcgctggcgctggtggtgctngaaccaccttctggcgcgtcggcctttgacactgtgccctactctctgaccgtgttcttcaccagggtgatcattatgggcagtgatttatactggttccatcctccccgaaggcatctggttcttcctgggcttcccctagatgctcaacattatcttccgacctcttcgtgctattcctgaaaaaccatctcctttacaacctttttttaaacttccatc

SEQ ID NO: 40506 - DNA, 481 bp, Oryza sativa
  Clone ID: uC-osroM202029a02a1
tttgtgtttgttgaaacattttgtttccatgtattttgaggaacatgcacatatcaacatacatgtaatacgatgttgaattaagcaagcaaatttaagcatgcagagtgcactgcttagcacacactgcatgtgttgctagctagctagctccatctagttccctctcttctcatcatgattgacacttgataaaattaagcaagatttagctagctagctgagctgatctgatcaccatgcatgcatgcaagcaaggccaattcaatttcaagctcgccggccatacaccacacagcacatatacggtgggtaaaacaaaaacaaaaaggaaatcatacacaacattgattcattcatccattctcttaattaattgacttgaggttgaggagcatatatatacgtgcgtggcatgcatgcatatatatggtacggtggtcgacgacgacgacgacgagcctagcaagcttggatgttt

SEQ ID NO: 40507 - DNA, 493 bp, Oryza sativa
  Clone ID: uC-osroM202029a03a1
gtggggcgtcgccggggagcagacacggccaggaccaccgctcgcgcaagatccaccgcaccttcaacaacgtcaagatcaccgtgctctgcggcctcgtcaccatcctcgtcctccgcggcaccatcggcctcaacctctccctccccaaccagcccaccgacgccgacgcgctcgccggcgccaaggccgtcgaggacatcgaccgcatcctccgcgagatccgctccgacggcggcgccgacgacgacgacgccgccgccgccggggacctcgccggctccttcaacgccaccgcgctcaacgccacggaggcggcggcggcctacgcctccgctgtcgaacgctacgcgctcggccccaagatctccgactgggacggtcagcgccgccgctggctcaggcagaactctgggttcccgtccaccgtcgccggcggcaagcccaggatcctgctcgtcacgggctcgcagccggggccctgcgacaaccc

SEQ ID NO: 40508 - DNA, 450 bp, Oryza sativa
  Clone ID: uC-osroM202029a03b1
gagatgtaacgcagtataaaaggcaagtctatttctgctgatttgagcccctatcacatttaactccatgataaacattagattgcaacctctaactgttacataacaataacaattccatgaacaaaaagaaaagaaaaaaagagtggaaaataaaacaacaccatccccaagtcacaaaatgctctgaccttgaagagagccaaagcaagtatgctattgccataccaactctcatcaggacttttcaagaagtggtcgatatcttggccttcacatcaagattctccttgtcatcaataggctttggggtctgattcctgacccttttgatcttggggcttttgagccccttgtgagcaaacccatagagccgcaacacctggttatcgggaaaattaaatgctcgcctcatactcctgagacaccgctccacaggataatccccat

SEQ ID NO: 40509 - DNA, 293 bp, Oryza sativa
  Clone ID: uC-osroM202029a04a1
aaccttcaggggggacttttaaacagatggacatcgtatttattcgactataaacatgcccatgtttattacaatgatgtgaatgaagatgataaataaatgatacatagagtagaaataatggcgtgtccatcgagcacttgggatcaaaacctgacaaaacgacgacggcgcgtatagttgcaggaaaatttctacatgatctcgacctaaagccctcggtagcagcaaatggaatgcttccatgttttttttatagaacatttggtgatatatccttattgtttacacag

SEQ ID NO: 40510 - DNA, 337 bp, Oryza sativa
  Clone ID: uC-osroM202029a05a1
ttttgtggttttaaatttttgggggtttttttttttttttttttattttttctattttcttataatttttctttttttctttacggggaaagagtcttgcacaccacttatttggacccgggaaaatcaccccgttgggaaaatcgagcaacacaagctgaactcaccccttcacccgacagggtgtcactggcccaggccggatactcttgatataaacagtagaacctcgcatgcagcaaaaaaaatggtattattcaccctttgcgactacacggaagaaaaagggggattgttaacccccccccaggccttattttaaaagggccaaaacccc

SEQ ID NO: 40511 - DNA, 454 bp, Oryza sativa
  Clone ID: uC-osroM202029a05b1
atccttatcttcttcgcgacggcggcgccgatcgtgaaccagaagtacggcggcgcgatctcgccgttcgggaacgcggcgtgcgcggggctcgccgtgacgaccatcatcctgtcgacggggcacatctccggcgcccacctcaacccgtcgctcaccatcgccttcgccgcgctccgccacttcccgtggctgcaggtcccggcgtacgtcgccgtccaggtgctcggctccatctgcgccggcttcgccctcaagggcgtcttccaccccttcctctccggcggcgtcaccgttcccgaccccaccatctgcaccgaccaggccttctataccgagctgatcatcaccttcaacctcctcttcgtcgtcaccggcgtgggcaccgacacccgtagccgttgagaggtcgcccgcgtaggcgacggcgccgacgacaccctcaacatcctca

SEQ ID NO: 40512 - DNA, 467 bp, Oryza sativa
  unsure (1)..(467): unsure at all n locations
  Clone ID: uC-osroM202029a06a1
tttgcggccgcgtgcggggccttcctgtgggacgcatcccggtggggctccaacccgagtgtggaagtaagcagctatgtgaacaccacctcttatgtcctcaaggaacctggcagtaataaacgtgtaaggtcagggtcttgtggtaggccaacatcaaaagcttccagggaaaagatcagaagagataagatgaatgataggtttcttgaattggggactactttggagcctgggaagccagtaaaatctgacaaagctgctatcttaagtgatgccactcgcatggtaatacaacttcgtgctgaagcgaagcagctaaaggatactaacgagagtcttgatgataagattaaagaactgaaggcggagaaggaccagcttcgtgatgagaagcanaagctgaaagtagagacggcgactttagagcagctggtgaagattgtgactgcaactccaggctacat

SEQ ID NO: 40513 - DNA, 378 bp, Oryza sativa
  Clone ID: uC-osroM202029a06b1
acgctaaaagggggcagtagcctttatagagcgccacaaatgtcagcttactttcatacaaaaacaaactacttacacaagaacaattgtgaatgtgaatcagggaccacgatgcccaaccaatggattgagcaactaagcggtttcaggttacgattaattcacataacgcaaccgatgaaacattacccgacaggcgggcacccttcgctgtccttggaggggtccacttctgaagggggcatgaactgccccattgggtaccccgggtatccaacaaaagggatcatcagcttctgccccgcggtttgcccctgggcattggggaagggggcaagtggtgcttgtgggtaccgggctggcatcaatgtggggtga

SEQ ID NO: 40514 - DNA, 491 bp, Oryza sativa
  unsure (1)..(491): unsure at all n locations
  Clone ID: uC-osroM202029a07a1
tggtcggcctctggggctccggcggcgtcagtggggctccaccagatggtccgcgacaactacacgcaaggactcatccgggcgttcggccgccgccgccatgacgaagctctcctccacaagtggttctcgcagctggacgtcgagtgggttctgctcctccacgccggacaaagagatctagactcctcctccgtcgaagatttgatggcgttgatggagcggtggatgagagctctcctaatcatggtgcaggtcctctccatgacgctgctcgagctccgagacagaaggtcgtcgtcatcactcgccggcaccgacgacgacgatgccttcctgcttcgcacaaagggatcggcaggcaacaggtcaccggcaccggagctgccggacttcgtgtgcgtgcaggaggttgtgcagttcgcggaggcgagcatcctcaggatgctggccttcgtcgacgccatcacactagccgntctcaacgacga

SEQ ID NO: 40515 - DNA, 424 bp, Oryza sativa
  Clone ID: uC-osroM202029a07b1
agaaaaccaaagtataagcaaagcgatgataatatatactctgtacagaggataatgaaattgtaatgcaaagattaaaactaaaaagtaaagcatctgggtgacttttttttttgagtagtttccagtagtctgaagtgaaattcaaactttttttggcaggaaattagcctgttaccatcatcaccaaaagacgaccatagagtgagtgttgaccagagcacaaacctttaagcgcgtaaccaatggtgagaaagagtcaactgaaatgcctaagttattgaggtgaattttccatagcaattgcattgaactcatcatcatccttcaaataattcatccaacaactcctttaactgctcgggcgtggacttgggcagttgattgtgcattccccttgctgctcgctcctctagatacatgc

SEQ ID NO: 40516 - DNA, 480 bp, Oryza sativa
  Clone ID: uC-osroM202029a08a1
tttggtttgtcacagagattgggctctgctgtgtttgcactagcttaccgatttgagtcgatacagtaaggtaaaagagtcgcacaagcacttgaagggtacaagcctgggttccgcaccagaggatataaccaatatttgaaaggaacattctaaatggacaagaaattagaaacctactagagttattacaggactgggttacacagatagtcacacgattcagctccttggagcacagctggccaagtgagtcttgaagttctccagctctgcaagaacttcatcttctggacggtatatcaggtcactcatgcgccatatctgcaatgttccacctccaccagtactctcaccatcatcagacacactcacaatagtccaaggatccgaagaattccagtggaagtctacaatcttatccctatgaccagcatgttgaaagaaaagcccagcaggtgcgttgggatttttcttatt

SEQ ID NO: 40517 - DNA, 476 bp, Oryza sativa
  Clone ID: uC-osroM202029a09a1
tttggttacaaaataagtaagcattattattccacaagaggatgcaagctcatatacatattgttgtttataaaaatacaaaaaaaagtacatagcaaaggacacttgaacatttaaataccgtgtcttaatatgacaaacactttaccaaaacacgctgaaccgttgtatacttgcagttgtaccattatctaaaaaaaatgcacctgtaccgtttctttactcatcttgccgatggaccaaattttgacaacacatccatggcatcactaactgagcttgtcgtgatgtccctgctgtcacgggcttcctccagtgccaagctctccttcagctgtagaaccacggtggacattgttggcctttgagtagcaacctctgatatgcagagcattgcagtatcaaccaccttccacatggagctaatgtcgtacaaatctttgagtcgtgcatcggcaaccaagctgatattacca

SEQ ID NO: 40518 - DNA, 355 bp, Oryza sativa
  Clone ID: uC-osroM202029a10a1
ttgtgtttttgaccttcaacgaagacttttaaacagatggacatcgtatttattcgactataaacatgcccatgtttattacaatgatgtgaatgaagatgataaataaatgatacatagagtagaaataatggcgtgtccatcgagcacttgggatcaaaacctgacaaaacgacgacggcgcgtatagttgcaggaaaatttctacatgatctcgacctagagcctcggtagcagcaaatggaatgcttccatgttttttttatagaacatttggtgatatatccttattgtttacacagaatctacaataattattcaccgtgcttcgtcttctagattgcggaacccggcg

SEQ ID NO: 40519 - DNA, 338 bp, Oryza sativa
  Clone ID: uC-osroM202029a11a1
ttgtgtttttggagaaagggggggttcgataaatattgcttcacttgtacaaagtacagataaaaatacattgatacatgacacggagagagccatgcacaccacttatttggacacacagagggcaaggctgcagagaaaatcaagcaacacaagctgaactcacggccccacctgtcagcctctcactggtcgaggccggagactcttgtgaaaaacagcaacaccacgcatgcagaagaagacaaattattacacacacaaatcgacgacacggcggccggcgacgtacggcgaggtcgtcgccgccgccggcgacgttgtgatgaggtcgatca

SEQ ID NO: 40520 - DNA, 480 bp, Oryza sativa
  Clone ID: uC-osroM202029b01a1
tttgggttgagtgccgagagagggaaggcaaaagcgcatctgattttttattattccacaacccaacactatgacactaacaacagccacagcctcaagaattgagcacatcactcactctcatcgttattgcattcccccaccacaaacaaatccaccccaacaacatgtggatgtagtactacatgatcgccatctctctccacacgacggcgtcacgtcccaaccaacgtcactctccaccgacatcgccggcgcatcagctgctgtgcgcctgcgtggtgaggccgtagcctaaggggaagagcgggtcgtagtgcgcgtcgccgacgttcatcggcaggtgggccacggacttgaaccacgtccgcgacagcttaccggggaacccgtagtggccgaacagcacgtcggccacgccctgcccctccgtccccggcagccacgccgccacgaacgcgtcgatgccgccgatgtacg

SEQ ID NO: 40521 - DNA, 512 bp, Oryza sativa
  Clone ID: uC-osroM202029b01b1
gtcttttgctttgctttcaggacatggtcacctttctcaggcagcaagcgtaagcaaggcagaggagagggaaagaacctctctgcagtgctgctgctgctagcttgcagaaaaaaaaaactctcatcttttgcaggaagagacatcactgtttctgcattcgtgtgcatttggattaagctttgcttatccctttttagtggagattgctgagtatatcaggtctatatattggcagctctggttggagatagacactcacactgagccaagatggggagtttgcacaagttcagtgttattctcctcatgttatgttttgctacgttggggagcgctcagtatgtcaagtataaggatccgaagcagcccgtctctgttcgtgtcaaggatctgctcggccggatgactctcgctgagaagattggccagatgacccaaatcgagagggagaatgccacggcggagcagattgccaagtacttataggtagtgtactgagtggtggaggc

SEQ ID NO: 40522 - DNA, 485 bp, Oryza sativa
  Clone ID: uC-osroM202029b02a1
ttttgttttttttttgaaatgaggagcacacagttgaatctgtaacctcagggctgtcgcatactggcataataacacaatgagagaccaaggggtgagacgttaaatgtcttatttgagacaaaagatgcactactacaatgcaagactttgacaaacaccagtctcaaatcttttcaacccttccatattctttttcctatcctcatcatctgtacatcgtctacacagcttcagtacaacatcaatccgacgtggcgaaggggaggggtagaagtagtagcagcaagaacattttcacctcttacacaaactgtcactttcttttttttgtctgattttcaagacatcctctccaaccacctcaaaccgggcaacacaacgaacaccatccagagaatttggcttagccatcaatttgacctcattggttgatgcaagaatgattttatcttaggctttcgggatcgatcgcgaagaaactc

SEQ ID NO: 40523 - DNA, 524 bp, Oryza sativa
  Clone ID: uC-osroM202029b02b1
gaggctgtagccctcccttttttttttttttttttttctctcttctcttctcttctcccaattcacacaagattcactcaccagctgtgccctcccattcccctctgatccaagcctttcactcaaagcttccagcttttccaattgcttggccacttcaagaatcaaggaatatgttcttgctcttggggttcctctgatccgactctccatcttccagcttccaggcttctctctcgttctgtgccatttttgctctgcctgagctctgtgcttgttgcattggtcactccaagaaaaggattttgaaggctggctttattgctcttctgttcctgggatccgaattgcaggcgagctcgctgttcgtggggggtttctttctttcattcattcgcttgaagaattcggcaaagccatgcgagcaattcgggatgatttctcgggcctttggacgcgtgatgattctttgacccaccattgcttcgttttttttttctggagaatctgcaattcgcgagttg

SEQ ID NO: 40524 - DNA, 479 bp, Oryza sativa
  Clone ID: uC-osroM202029b03a1
ttttgttggtcgtctagaatgggttgccccagtacatgaggatgtcctggaggagggggtcgctgccgccgccgccgaggccgccgaggccgccggagccggcggggtcgaggatggaggcggcggggttgatgggcccgacggtggcgaaggtgcgctcccactcgctgatcttgggctggctctgcacctcgcacgcgaactccggcgacagcacctgctccgagcagctcgagtcggcgtgcagccgcggcatcgagtccgacggccggtcgtagtacgccgccaggtccgggaacgccggccccgccaccaccggcttctgctccggcggggagctcaccgccgcgttcacccccaccatcggcttcctctcgacgccgccgccgttgctcaccatccccgccgccgccaccgtcgcggccggcggcttctccagcccgcccttcttgttgtaaatccggcacagcacccaatca

SEQ ID NO: 40525 - DNA, 459 bp, Oryza sativa
  Clone ID: uC-osroM202029b04a1
ttttgtttttttgggaaaacaggacaaaatttgtatagacctcacgaatgcacaaattaatccctctgtttacaaatcaaccaaaatgatcaatgcaaccgtataatctatctctaacaacacaatcttctcgccggtgtgcgccgccctatcttggaccggagagctgcgacgacgacatgtacgacggccacccgctcatcgtcgtcaccgtcgtcgtccccgaccttgtgtggtccccattggaacccgccatggcttgcttgatgccgccgccgctgccgcccgagccgtcggccggtccggcgaacccccggccgtagagccggaggaacccgagcgactgcacgcgtggctcccacagttccatggtgccctcgagcatgccggccaccatcgccatgctcggccgcagctgcgggtcctcgtggaggcagcagagccccacctttaccaccc

SEQ ID NO: 40526 - DNA, 473 bp, Oryza sativa
  Clone ID: uC-osroM202029b05a1
ttttgtttttttttttatccggtgtgcatgttgatactatatatattcgctcgaacaattcacaccacactcaaaatctcaaatcaacagatgttctcaagatttcgatcaagcatctccagccccatcttcattggcctcgttggtcgattgccgccgtcccgcggcccagcgaccgagcagtcctctgatatcccactccaaatccctcaggcgtagcaacaggtacagcacgattccggagatgaagcccagcgcggcgctcgagcctgtgagcgacacgccggcgcagaccagcatgacgaacgactcctgcttgctccccatgtcgcgcgacgccatggcgagctcgatcccggagaagagcagcatgacgcccagtatcccgatcgggaactgccccaggatcgtcacgaacgagttgccgaacaccagcccgagcgccagcttgccgatggccaggaacaccacgg

SEQ ID NO: 40527 - DNA, 474 bp, Oryza sativa
  Clone ID: uC-osroM202029b06a1
tttttgttttttttttatccggtgtgcatgttgatactatatatattcgctcgaacaattcacaccacactcaaaatctcaaatcaacagatgttctcaagatttcgatcaagcatctccagccccatcttcattggcctcgttggtcgattgccgccgtcccgcggcccagcgaccgagcagtcctctgatatcccactccaaatccctcaggcgtagcaacaggtacagcacgattccggagatgaagcccagcgcggcgctcgagcctgtgagcgacacgccggcgcagaccagcatgacgaacgactcctgcttgctccccatgtcgcgcgacgccatggcgagctcgatcccggagaagagcagcatgacgcccagtatcccgatcgggaactgccccaggatcgtcacgaacgagttgccgaacaccagcccgagcgccagcttgccgatggccaggaacaccacgga

SEQ ID NO: 40528 - DNA, 479 bp, Oryza sativa
  Clone ID: uC-osroM202029b07a1
ttggtttttacaataaaaccaagttaacttctgtgtaaaaatggagcaatggatcatgcaaagctaacatcagttattattggtacacatatctctactccacagaaactcccaatggaacctcttattgagcactccacaaatatggagcctgcaggtcactctgcgaggttccatctcaacttttcaaaactgtaagaacaaaaaatttaaaaggtacacgtcggtatcgtcgtgtctctctatgcctcggcgccgagttccaacatcaaggtgtggttcgcatcgttgcttccagggccactgaactggatgggaccagggctgatgtaatggttcttgagggaccactcatctcgcaatgaagcaaacttcttaaacggtgccccgtcaagttccaccatagccttcttgatcactggcttgtactttccgtgccttctctcaacatccatcaacgatgtcaatgcagttccacc

SEQ ID NO: 40529 - DNA, 515 bp, Oryza sativa
  unsure (1)..(515): unsure at all n locations
  Clone ID: uC-osroM202029b07b1
ttcttccacccccgaaaccactccaaaaccaaaccaaatctcgcggcgcatggcggcggcggcggtggcggcgaacggcggcggcgacggcgcgcaggcgtccaacgcgcccgcccccaccaggctcgcgtcggtctacagcgaggtgcagaccagccgcctcaagcacgcgctccccctcccctccgtcctccgctcccccttcgccctcgccgacggccccgccagctccgccgccggcaaccccggtgagatcgcgaagctgttccccaacctgttcggccagccgtccgtgtcgctggtgccgtcgccggagccggcgtccaccaggccgctcaaggtcggcgtcgtgctttccggcggtcaggcgcccggcggccacaatgtcatctgcggcatcttcgattacctgcaggaatatgcaaaggatccgtcatgtatggattcaggngaggtccagctggagtcatgaagtgcaagtacgttgagctcactgcggattatgtgtaccccta

SEQ ID NO: 40530 - DNA, 472 bp, Oryza sativa
  Clone ID: uC-osroM202029b08a1
tttgtttttttttttttttttgttttttttttttttttttttttttttttttttttaaacaaaccccataataatttggaagaaaaaacagggggggttacaaggtacaggcttccaagggggacctttaacgctgggataaatttaacattataacatggttttgccaaactaggtaagttccatccacaatcacaaaacttggctttaggggcggggggaaacaacaaaaaacttacagaaacatgtttcccccattgccactagacccaacagggttcccagagcccggaggacaaaaggaaatgggttttcacttttttttcccgggatcaccagccttggtttttttgaccccacggatctttttagctttggtcttggggtctttcatttggttgggagatttctcaaccttgggaggcagaccattcctgaggagggggtacttggggtcgtactttttcggggg

SEQ ID NO: 40531 - DNA, 513 bp, Oryza sativa
  Clone ID: uC-osroM202029b08b1
cttacctctgccgcgctcctcctcctctcctctcctctcctctcctctcccggtggcggcgcggccaactccagccatgtcggactccaaggccgcggcggcggtcaccctccgcacccgcaagttcatgaccaaccgcctcctctcccgcaagcaattcgtgctcgaggtgatccaccccggccggcccaacgtctccaaggctgagctgaaggagaagctggccaagctgtacgaggtgaaggacgcgaactgcatcttcgtgttcaagttccgcacccacttcggtggaggcaagtccaccggattcggcctcatctacgataacctcgacgccgcgaagaagtacgagcccaagtaccgcctcatcaggaatggtcttgctaccaaggttgagaaatctcgcaggcacatgaaagaacgcacgaacagagctaagaagatccgtggtgtcaagaagaccaagctggtgatgccgtgaaaagaaggaaaactcattacatttgactactg

SEQ ID NO: 40532 - DNA, 483 bp, Oryza sativa
  Clone ID: uC-osroM202029b09a1
tttgtttaaattgctactgagtactatattaataaaaccataataatccaaactttaacaagtaaagcaaaaccggggccataatgaaagcccgtaccaaaaaagttgcaggagcactcaagaattcggtgtaaaacgaacgacaaattattgcaggtataactaaaagcgataaaagatcgatcatttagtcgacttcctcgatcttgggccctggtccgctgcttccgccggcggccgccggagcatcctcgtccatgcctccggccatgtcagctccggcgccctggtacatcttggcgatgatggggttgcagacgccctccagctccttcatcttgtcctcgaactcctcggcctcggcgagctggttgctgtcgagccagctgatggcaccgtcgatggcgtcctcgatcttcttcttgtcggcctccggcagcttggacgcgatcttgtcgtccttgatggtgttccgcatgttgt

SEQ ID NO: 40533 - DNA, 470 bp, Oryza sativa
  Clone ID: uC-osroM202029b09b1
tcgctcctgccatcttcagatcgcatcgattttctccttttcgagtttttttccccttcgcttgagagctttcgacgagagcgagggagagggagatcatggccggcaagggagacgggccggcgatcggcatcgacctcgggacgacctactcgtgcgtcggcgtgtggcagcacgaccgcgtcgagatcatcgccaacgaccaggggaaccgcaccacgccgtcgtatgtcgcgttcaccgactccgagaggctcatcggcgacgccgccaagaaccaggtcgccatgaaccccatcaacaccgtcttcgatgcgaagcgtctcatcggccggcgtttctctgacacgtcggtgcagagcgacgcgaagctgtggccgttcaaggtgctacccggccccggcgacaagccgatgatcggcgtgcagtacaagggagaggagaagcaagtctccgccgaggagatctcg

SEQ ID NO: 40534 - DNA, 477 bp, Oryza sativa
  Clone ID: uC-osroM202029b10a1
ttggttttagctgcatccggggtattaattgcaaaaagaagaagaagaaggaatcaagaaaacccaaattgtgatgatgagatcgagacgcgaaatatatatctcttctccgatcgattgcgacgacgatgacgacgacgcagtggatatgatgtgcgtttcaagccattgctgctgatcattcttcgccatgacaagcttcagacgaactggctctggctaagctggggttggcgaaagatgatcagcaccaggttggtgtatatcacatatatatttcacatctcaggagaaatttttttttgatcattagcctctgtgattgccatctaatcatgatctgcaccgtgccagtcaggcctccctagagtgaactcgagactagggctactcagctcatggttggacacctgcgagctgctcgatctgcacggttccaagttctcaataggagaagacaatcctacggagcgatgg

SEQ ID NO: 40535 - DNA, 472 bp, Oryza sativa
  Clone ID: uC-osroM202029b11a1
tttgttttttttttttttttggttttttttttctgggtaaaaatggagcaatggatcatgcaaagctaacatcagttattattggtacacatatctctactccacagaaactcccaatggaaccttttattgagcactccacaaatatggagcctgcaggtcactctgcgaggttccatctcaacttttcaaaactgtaagaacaaaaaatttaaaaggtacacgtcggtatcgtcgtgtctttttatgcctcggcgccgagttccaacatcaaggggtggttcgcatcgttgcttccagggccactgaactggatgggaccagggctgatgtaatggttcttgagggaccactcatctcgcaatgaagcaaacttcttaaacggtgccccgtcaagttccaccatagccttcttgatcactggcttgtactttccgggcctcctctcaacatccatcaacgatgtcaatgc

SEQ ID NO: 40536 - DNA, 551 bp, Oryza sativa
  Clone ID: uC-osroM202029b11b1
cggcatattctctttcacccccgaaaccactccaaaaccaaaccaaatctcgcggcgcatggcggcggcggcggtggcggcgaacggcggcggcgacggcgcgcaggcgttcaacgcgcccgcccccaccaggctcgcgtcggtctacagcgaggtgcagaccagccgcctcaagcacgcgctccccctcccctccgtcctccgctcccccttcgccctcgccgacggccccgccagctccgccgccggcaaccccggtgagatcgcgaagctgttccccaacctgttcggccagccgtccgtgtcgctggtgccgtcgccggagccggcgtccaccaggccgctcaaggtcggcgtcgtgctctccggcggtcaggcgcccggcggccacaatgtcatctgcggcatcttcgattacctgcaggaatatgcaaaaggatccgtcatgtatggattcagggaggtccagctggagtcatgaagtgcaagtacgttgagctcactgcggattatgtgtacccctacaaaaaccaagtgtcaagtactgctga

SEQ ID NO: 40537 - DNA, 482 bp, Oryza sativa
  Clone ID: uC-osroM202029b12a1
ttgtgttgtccgaaaaaaagggccagtttgatactattcgaaatcactgcaatgagtgagtgacacaatggagcaacaccaagagtgcactgcaaagccggttttgatccttacaccacacaaggcgagagggagacacacccgttgataatgttgttacaacatcgacatgtccatcgatatctgaggtgctacatggcgtacctctgagtccaggtccttgctgtgttctcgtacttgtgcctatctgtcttgtacatgtgggcgatctcagggaccagaggatcatcagggttcggatcagtcagcagggaacagattgacaggcaacaccttgaaattggtagtgcttggcttcattggtccttaaggatgtcaaggcaaatgctcccgttgctgttgatgtttggatggaaaaccttggtgcgaaacgccaccttgggtggtttgaagggataatcaggagggaagtggatggtaac

SEQ ID NO: 40538 - DNA, 482 bp, Oryza sativa
  Clone ID: uC-osroM202029c01a1
ttttgttttttaaaccaaacgatgtttttcattaagagtactgatatattaaaacagagcagctagtttgctcgtcttgcgagatctgatgacaagcctagaacaagaacagcagcagcaggagcaggaggaggagaacgtgttattcctctgaactagtagtaagtttcagctgagatccgacggctgcaaatgccccatctctttgcttcagaagaaagcacggcttccgtagaatactttgggagatttctccggcccaccggccatcggcttcttcgccgccgccgcggccgccgcgcccgagtcggcgccgctggagtccgcgtcggaagcggcggcgccggcgccggagacggccgcgctcttgtcgctgccgttgtccaggtccagcgggagcttcatcttggcgagggactccgtgaactgctgcatgctcttcatgtacatgtccatgatctccttctggtcgaccttgacct

SEQ ID NO: 40539 - DNA, 484 bp, Oryza sativa
  Clone ID: uC-osroM202029c02a1
ttttgttttttttttttttttgtgtttttttttttaaacggcgaaacatgcaccagcatgggccactaagattaagcaatatacaaaatgcacccacatttccaactaaaaaaacactcacatttttgtaacaacagggttgacagactggatccaatgctacaacaggtcaactcattgacagtaaagccccttactgtcaatgagatagcagagacaatacccacatgtcagaacaaaaaaaatatcagcagcccatcatattatcttcagcaggaaaaggggtaacctcaacatttccagacccgtatcaacaaggtttgatatttgcaggaaaggtagactgattatccaagatggatattcaaattgatgttagcacccgtcatcccccaaaaaagaaaccccgacccactgtacttttattgatggccggcttttgctatcagaatactaaaggggttagatcgactataactcaaat

SEQ ID NO: 40540 - DNA, 485 bp, Oryza sativa
  Clone ID: uC-osroM202029c03a1
ttttgttaaaatcaaaagttatgcaacttttatttgactcatcatttcatcaatcaccagttatcagtacatgagcatgggcattcgactgataaaacggctgatgatacaacactacagtacagattacccaaagcacgacaagtacatcagtttttggcatatcaacactacggattatacagagaggaagagaaatagacctcggcgcgtcgccctcaaatggtgtagtccgaccactgtcgaatgaaggatgtgtgatccatggattccccgggcatgtcctcatccttctcaacctcaccgttcttcctgccaatcaacctggctggattccccaccgccgtgttcctcgccggcacatctatcagcaccactgacccggcaccaatcttggccccggctccaatcttgacgttgccaagaatcgtcgccccggcgccaatcagaacaccatccccaatcttggggtgccggtcaccgac

SEQ ID NO: 40541 - DNA, 473 bp, Oryza sativa
  unsure (1)..(473): unsure at all n locations
  Clone ID: uC-osroM202029c03b1
ggcaatcgctccacttgtcgcctatatacgccttggcctctcggcgtccgatgctagtggtagtggcccgcaaatcctcctcctccgctcgcgtcgccgcccaccaaacccgatcccaccgcgccgcgatgccggccggccagccgcacgcgcacgagcccgacggcggcggcgcgagccaccgccggccccagtcgccgccgtcgctccccgcggaggtggtcccggcgttcgcgccgccggagtcggaggacgaggagtcctgggtctggtcccagatcaaggccgaggcgcgccgcgacgccgacgccgagccggcgctcgcgtgcttcctctacgccaccgtgctctcccacccctccctcccgcgctccatctccttcaccttgccaacaagctctgatactccaccctcctctccacgctcctctacgacctctttctggcttcctttaccgngcaccccttccttc

SEQ ID NO: 40542 - DNA, 471 bp, Oryza sativa
  Clone ID: uC-osroM202029c04a1
tttgggtggttagctaggttggtatgagcctctgatgatcatgccaccatctgctcctgctccggccactgcgcgaatatgtcgccggcggcgtggccgtccttgacaagagagttcacccatgacacgtccggctccgccgccgcggcgtgcgtcgccaccggcatggcggattggccgcggaacgcgaacgacgccgacttgcggagcttgtgcagctcgtcgccctggacgccccagtccagcttgccgtccggcgagccccagtccgagagaatggacggcgcgccggtcgtcgccggcgacatgagcgaacgcgccgccggggcgcggcctccgcggtcgatgaagctctggctgcgcttggcgaacgccgaggcgcgggagctcatgatcgccttcgccatggagtggtccagcccgaacgcggtgttcgcgccgcccaccatcggcgaggtcggcatgtgcatc

SEQ ID NO: 40543 - DNA, 475 bp, Oryza sativa
  Clone ID: uC-osroM202029c05a1
ttttgttatcgtgaaaaccatgtatacacaatagatgggtcttctttacaggaagcaacttgtgacatcaatcatttggaatcactaccagaaaaaatatgctacgactaggatggaatatacatctcttaattgcccggccaacaaggatcatggaacaaataatcagaccgccgcattgctgcttaattgcgtagacttaccctctcccaaccctgacgtggcgctggttgcgaaaatagcttagaagaacctgagccttctctcttgcacgggctgtgcctgattgcgacaatgcaaccaaaggtggcacgacgccttcttgaagaaccagggtgcaaaacctgttactgtttgtgcagagttgtagcagggcagcagcggcattctcctttgaacgtgcagaacccagctcaacaacctcaaccagtacccggatgcctcctgcctgagcaatggcattccttccatcatg

SEQ ID NO: 40544 - DNA, 571 bp, Oryza sativa
  unsure (1)..(571): unsure at all n locations
  Clone ID: uC-osroM202029c05b1
ctgggttacaacatttgtccaaagacacgccaaatattgggacacaccaaattgattcctaacttcactgtcaaacagttgattgaaaattggtgtgaggtacatggtataatgctaccagatcctgttaaactcttgagtttgtgcttccctgtttccctcaacatcacagatggaagtgcaagtgcagacaagtctggatcaccagaacactgccaattggtagctgcattgcatccaaaagcacagtgcgcatcggatgatagtcatcattataatttgatgcatgaaaactctgattcagatgatagagtgtcatcatttggagacacagatgattctgaacctgattctttaagattatcaacagaaactactgcagcaaacaaatctctacttgatgaaaaaactgatcgttctgatggtcttaagcaattgagagacaatggttttcaagtttctgatgaggaacagtatctcgaaaggatggtaaaagtcatatcagcagncatcatcaacttgaagttgatggagagaatgtcagggtacaagcatcaagtgacatcaatgc

SEQ ID NO: 40545 - DNA, 467 bp, Oryza sativa
  Clone ID: uC-osroM202029c06a1
ttttgttaaaagttaaagggagctctgatgaacttattcctgccaaaattactgcacacacatgaacttgcaaactagaaccaagatgggctggacaaaaagctcccagcgattaacacgcgcgattcggcccattatttatttattcctaaattaacacagtccacgcggtctcccgtctcccagacaaaaaaaaaaaaaccacacagatcacactattcggctacttgtcgtcttctgacccgaccggtttggcgacaagccggagagggatccgccgccgcacggtgaatcccgggtcgtcggacatgtcgagctccccgggcggcgggatctcccagtcgaagaggcggaccaggctggccagcgcgagctcgacggtggcgagcgcgaactgcatcccggggcacacgcgccgcccggtgccgaacgggacgagctggaagtggccgcccctcaggtccatc

SEQ ID NO: 40546 - DNA, 552 bp, Oryza sativa
  Clone ID: uC-osroM202029c07b1
gggacatccaagagaggtgtaagattgggtcagggccgcagaacgactggtacttcttcagccacaaggacatgaagtacccgacggggacgaggacgaacagggcgacggcggccgggttctggaaggccaccggtcgcgacaaggccatctacaacgccgtccaccgcatcggcatgcgcaagacgctcgtcttctacaagggccgcgccccccacggccagaagtccgactggatcatgcacgagtaccgcctcgacgaccccgccaccgacaccgccgccgtcacacccacggttacttctgctgctgctgcggcggcggcgatggccgcggcggcggacggcgggcaggaggatggctgcgtggtgtgcagggtgttcaagaagaagcaccaccacaaggaggcccgcgggaggcggcggcaagcacggcggtcgacggcagcgcccggcgccaagggcggcgcacgcttactcctccagcgacgacgcgctcgaccagattctgcagtacatgggcaggtcgtgcatgcaggagcacgagcttccc

SEQ ID NO: 40547 - DNA, 77 bp, Oryza sativa
  Clone ID: uC-osroM202029c08a1
ttggtttgaagttgcaaaccagaagctttattagaagttggtaccggcacacaagctagcaccggcccttacaacaa

SEQ ID NO: 40548 - DNA, 481 bp, Oryza sativa
  Clone ID: uC-osroM202029c09a1
ttgtttttaaggatggaatggagtagcaatactttcaccccaaaatacagtttagcgacaatatcttagaaaagccgcttgctttgccgccatggctggcaagctgagcagagcagctaacacaaagaacacgagatcactataaaccaaacggcaacgaacgaagaaaatacagggtcttttttgtctgaagatacacgaagcggttcgttttcttttatttttagtctcctctcctcctcgatgatgggtgtatggcaatggcaatggcgatgggatcttggcttagttgatgggaaggggctcgccgttccactccttgaggcagtcgagcatggggtcgatgagcttgccctggctgatgccgaggaacaccttgttgcactcctcgccgggggacttgagcttctcgccggtgaggaatacgcagccgagctcctcgcggacgaagcggtagagcgggaacgaccggctctcgacg

SEQ ID NO: 40549 - DNA, 481 bp, Oryza sativa
  Clone ID: uC-osroM202029c10a1
gcgccgtcgtagggcctccgccccgtcagaagctgcagcatcaccaccccgaagctgtacacgtcgcccttgtccgtccatggcgccgccgccgcctccggtggctcgtagctcagcgcgtcgagccagcattccgactgaagatccaagccggatttcacagccgcagcaaggccgcagccggacacgcgcacacgcatctcgccgtcgacgagcacatgttcaggcctgaaatgctggtgcacaacctgtctctgaccaccttcgtggaggtactctagagctttcgcagcttcgagtgcgacagctacccgggcatcccatggaagagtgatcttggcagcaggatcgtctgatgatgccagtttcttcagatggatcatgtcgtcgagagtttcatcgctgaaatgcttgtagacgagcagcctctgtccgtgctcgacgcagcatcctgcaagctcctcgatgttgggatgctgga

SEQ ID NO: 40550 - DNA, 489 bp, Oryza sativa
  Clone ID: uC-osroM202029c10b1
tgttgttctcagttctcaccaccatttttacctcgaagatttctagattcgatcagcaaaccaattggaagcacaatgcagttcaggctggtgatcttggttctgctcctctcctgctcgcttcagctgcttcgcgcgtttccattccccatcccgttctttggccccttcacgagcccacaagacgttgatgcgataaacgagctgtacgcgtcgctgggctcgcctgacctccatggctgggcttcttcaggaggagacccctgcatggaagcatggcagggggtgcaatgccttggacccaacatcactgcaatagagctcagaggtgcaggcctgggaggaaagctgagtgagacgctgcggaagttcactgccatgacagcattggatctgagcagcaaccgcattgggggagtgattcctgagagcttaccacctgcagttaaacaactgaatttatcttcgaatagtctcagtggcaaactc

SEQ ID NO: 40551 - DNA, 472 bp, Oryza sativa
  Clone ID: uC-osroM202029c11a1
ttggtttttcaggcagccaccgagggcgagggataacgagttctaatggcaatgtgaaccagaggggattctgaaatctgaattatgatcacgctccagcaaactggaagcacatagagctggctggccttgggaactatgtatttgcataccagcacagcaatggtaaaagcaatagcatcctaattacagcagtggtatcagaactgaggcaaagggtttcctcctccagatctcctaatgcaagggctcctccgaatctcctagccgtgataggtggaggtaagcatcggttccatatccttccatagaaatgatctgcaggtccccgccaaaatatcgagcataaagacggctaatcgggatcccatagccgtacccggccatggtcactccttcgttacggccatccagatcaggtgggttttctgctgtgctgtagagatatgtgaaaattctcgagagaccactt

SEQ ID NO: 40552 - DNA, 477 bp, Oryza sativa
  Clone ID: uC-osroM202029c12a1
ttgttttttttacagtagaagaggactggaatataagtataacaaagtcacaattataagatattgatggtagtgagtaccattcgacgaaattaaaccactctattaatactagccaaaccatatataatgtagcataaagctgaaacataagctaacaaaattatgtctcagtcgaaggatgagacgcgatacaacaccaatccaccagacagtatgaataacggcgtagaacaagtcctaaagattggataaacaggccttccttcaccctaatcccaacaccgaactgcaattatactgctcttcctgaaaccagtgatgctaagcagcagtgctgaattacttatcgcctgctcgtcttgccaatagaacgttttccagagaatagatgctttggtttcaaagttggaatgacacgatccgcctcaccgcgacgagcctccttgttcctgttcctcacagaatccttagctt

SEQ ID NO: 40553 - DNA, 449 bp, Oryza sativa
  Clone ID: uC-osroM202029d01a1
gtgtaaaataaatttttttttcttttatttttttttaacatttaatttttgtgaccatacttgttttggggcggacaaggaaataagacgagagcctccctgaacctggcggaaaaaacgtgggcgcggaccttggtgacacagctggccagaaaccgcgagccggcgagcggagccggcgcccgcatgacgaacaccgacaagatgaggtcggagctcaccagcggaccacgcgacaacggcgcgccgcacccgaagtcgacgaagatgaacccgacctggctccagggcgacacgtccacggactcgaagtgaaacctaatctggaacgggtcggcgccgccggtgcgcccctccgcccagttaaagcactcgccggccatccgccggtttgcctcccggaccacgccgacgagcttgatcaccgacgacgccgccacctaccccgc

SEQ ID NO: 40554 - DNA, 415 bp, Oryza sativa
  Clone ID: uC-osroM202029d01b1
aacaaaagaagatattaagggttcttacaaccttatctcattacatgatgcacatagagcatttgaaacggggagaggaaaaacagacttggtcagtatgaggtttgaccagctaatgcaccgcgatgcactctatctaggaaccacacgagaggatatactttctattgagaaaactccccggcaactacagatcgatcggccctcggaccggctccagttatcgttatcagaagcagcattacactgacgctacacgagccttggtttttccctggttgaacattttacctactgcaccactactacccgttcgacggcatgcctgagaggacgtacatgtaactctccacgcatcggcagtctcttcttctatgacgtgcttctactttgagcaggccgacgccaactgcac

SEQ ID NO: 40555 - DNA, 463 bp, Oryza sativa
  Clone ID: uC-osroM202029d02a1
tttttgttttttttttttttttgtttttttttttttttttttttttttttttttttttttttttttttttttttttttttttttttttttttttttttttttccccccgggaaaaaaaatatttttttttggggcgggcaaccacccccccaatttggggtttattttttggggccaaccccccccccgggtaggcccaaaaagacccccccgggggccaaacccagaagggcccccccctttttttctttttccaaaaaaaaaaaaaccccttggggccaaaaaaacgggaaaaaaaaggccctttcacccttttaagggggcccccccccaaaaattgggggccgcccccccccgggggtaaaaaaaccccccccccacctaaaaagcccgggggccgggaaacctttcccgggagctgggggggcaaaaggggaaaccccaaattttttttaggggcccc

SEQ ID NO: 40556 - DNA, 335 bp, Oryza sativa
  Clone ID: uC-osroM202029d03a1
ttttggtttttttttttttttgggtttttttttttttttttttttttttttgggttttttttcaaaaacaccaacaaattggtcggtctaaaaaggacacgacctattaaaaaaagggggacaaacaccaaaaggatttaaaccccttttttacttccaaaaggaaggcgggaaggaaaggattaccaagggaagaaaaaagggggccggggccatgggaacaaaaaaacatccccatgagcggcctgtcatcgctggggggcccccggcgggtggaaccgggggggacccccggaacaccccgggggtccaggagccgggggggagcaacccgg

SEQ ID NO: 40557 - DNA, 224 bp, Oryza sativa
  Clone ID: uC-osroM202029d03b1
acatcaacaaattgtctgacctaatatgtacagctcctactaaaagtaggggtgcattcaccataagcatgtcctccccgcttctacctctaacaggaccgctggaatgaacagacttccctagggcagaaacttgcgttcagctcctattgaaattaaatcttatgaagacgagtggcatgtcgcgtggctctctttgcccggcttgctcttcgcgtacctcc

SEQ ID NO: 40558 - DNA, 460 bp, Oryza sativa
  Clone ID: uC-osroM202029d04a1
tttttgttttttttactactatgaacaatgaacttatcaattgaattctcctaaaccccaaatataaaaaaggagatttgaggaagtaatcctcggtggtaaaaaaaagttggaaaagatatgaacaagaagatgaaagttctaagttttttttcttcttccctaattatgattttctgggatgggcaatgatgcctccgcaccagacactcacgagatggacggccgagatgagacgacgacagctcaacagaggatggcctccacgccccctgtccggacgcaatggcagacggggcacgccatggccacgtccacgtcgccggcggcgaagcaatcgccgcagaggctgaggtgcctgcaggggaggagcaccacggtggccggcctcaggcggcaggtgaggcatgcgcggtcagacccgctgtggcgcgggtccacgtacgccgacgaggacgac

SEQ ID NO: 40559 - DNA, 540 bp, Oryza sativa
  unsure (1)..(540): unsure at all n locations
  Clone ID: uC-osroM202029d04b1
attaataccacgcgaggaagttttcttccccgtcgtcacctcccgcttcgcgaaccacccacccgtccgtttctcgcctcgcctcgcctcgccctccctctcttccttcttaacaatggcggtacaggcccagtacccttccagtctcctcttccacgatagaggtgagccggagaggacgaaggagatggacctgcccaggccgcagatgttcgccggagtctcgccggaggtgtactttcccagcggaggagcgagtgggattaatcggaggaataagcgctcgagggaggccattgccatggcgccgccgccggccaaggaggagttggtcaatctgttcacgctccagccgcagcagtctacgtcgtttgtcaacatggcgcagctccacaacagggtatcggcgtcgccgtcccgcgcgccggcggcactcgtgtccactggccttcgcctggcattggatgagcagcagcagcagcagcagcaacaacaagagagcnaacgcctgaaagccttgtgctactcgtcgtcggccat

SEQ ID NO: 40560 - DNA, 470 bp, Oryza sativa
  Clone ID: uC-osroM202029d05a1
ttttgtttttttttttctctttcccaggccaaagagctcatatttgttatccttggaacaaagcaacacgggggcaatgcgccatctagtctcatccgatataaatatggagaaagcaaaaaaaaaagaaaagaaaagaaaagaaacgaaaagaaggaagtaagccaggagtgaattttattcatcattccctgtgtattacactatacagtagtgcttcaagatacatgcacatatatggacagcattctggtattcgcatatcacatctcgtgtatttcttgggtttctgtcgctaaccttgtgttgctgcttcacatctctgccacgagtttggactgggcaagcgcaagatcgaatgaggagaaagagtgaggagcaagcgtgacttgcatctgctctgctgcattggaaagctggcttttgacaggaacaaccttattcgggttactaaaagagttctcatccat

SEQ ID NO: 40561 - DNA, 485 bp, Oryza sativa
  Clone ID: uC-osroM202029d05b1
cttccttgttgaggtctgaggtcttggatggtggccttatgacacacggcctgcactagtgtttacagctccaagtatggcttccagagaatccttcatgagtaccattttcttcttcttgcttctgttctccctcggctgcaagtgtatagcttcagagttacacttacatgcgacccagactgcggtcctcaaggttgatgcctcaccgcaacttgctcgacagatccctgacacactatttggaatattttttgaggaaatcaaccatgcaggggctggtggaatatgggctgaacttgttagtaacagaggttttgaagctggaggccctcataccccatcaaacattgatccatggtccataattggtgatgactcttccatatttgtggcgactgatcgaacgtcatgttttagtcggaatactgctgctctaaggatggaggttctctgtgataattgcccagctggtggtgttggca

SEQ ID NO: 40562 - DNA, 476 bp, Oryza sativa
  Clone ID: uC-osroM202029d06a1
ccgtggcgcacgccctgaacatgccggtggtgttgtacgccatggccacctcgccggcggccgacacggccaccagcccgaccttgcccggcggcacgccggccacgacgcgcgcggcggcgtcccccagggagaggccggccggcggggcgtgctccagcagggccgcgacgtcgcgcgccaccgtgtgccggatgatggcctcgcccacgcccgtggccgacacggcgcacagcgcgttggcgtacgtcccggcgccgatcaccggcgtgtcgccgatcctgccggccatcttgttcaccagcccgccggtggacgtcgccgtcgcgaggttgccggcggagtcgatggccacgcagcccaccgtgccgacccggctgttgtcgtccttgggaattggttgggtgtaatccacctgcaccctgttggcttcttttgcttgtctgagcctctctttgtttgcctccgtaataaag

SEQ ID NO: 40563 - DNA, 69 bp, Oryza sativa; identical to SEQ ID NO: 17936
  Clone ID: uC-osroM202029d07a1

SEQ ID NO: 40564 - DNA, 385 bp, Oryza sativa
  Clone ID: uC-osroM202029d08a1
gcaaagggagtaatcaaagttccaatacgaaatcggggtcgtagtagtacaatacaaagacgagttcacggagcgcgtaaactaataaggaaaaattaaacgtcggggagaaataatagccgaactggatgaagatgagcagcactgccttttgcctagcctagcccatcatggggaggccgacggccccgaccaggaggcccatcaccgaacgggccttgttgccgttggccccgccggtgctgcccgtcgacttcgtcgtcgtcgtcgtcggcgtcgtggtcgcgtccggcgtcgacgagggcgtgtccatgccggggtccgatgacggcgtggcgggcgtcccggtggacggcggggacgaccaccccgtcggggtgggggg

SEQ ID NO: 40565 - DNA, 69 bp, Oryza sativa
  Clone ID: uC-osroM202029d08b1
ttatttttttattttttttttttttttttttaacacacaccacaatataataataggtgtgggggggaa

SEQ ID NO: 40566 - DNA, 483 bp, Oryza sativa
  Clone ID: uC-osroM202029d09a1
tttgtttttttttttttttttggtttttttttttttttttttttttttttttctttttttttttgtttttcttttttttttttttttacaaaaaaaaaaaaactaccccattaggggcccaaatttcccggggggccgggagacaaccaggttcccccaaaacttcccacgaaaaaactttccccccccttgtttgcccgggggggggaaccaccaagtgcccccaaaaatgccccattgaaaaacaaaacaggggagggaacgataccaaaaacctctcccaggggccaaaatcccggggcccttgggcgaaagggccggcaaaaaacataccccccaacgctgggaaaaagcatttcctttttttacccactcaccgtttaccccccccggggaatccctcccattgcccccagcccaggggggacggggaaaaaccctccccggctaccccccccctcgggcttttcctaggccgggggg

SEQ ID NO: 40567 - DNA, 470 bp, Oryza sativa
  Clone ID: uC-osroM202029d10a1
ttggttttttttttttttttggtttttttttttttttttttttttttttttttttttaacgagaaaattcccagcatacaggaatggggtttattcagtttcataacagggggtttcgaaatcagatttgctcataacagataaccaaatttcagcctaagcgctttgggctccgggggatttccagagttggggccattcctccattggatcagcagttttagcgaaaattgcattttgggggcccagtttctccttgacaatgctgggtagttccttaacacagtttttaacaggaactgaaggcctcgatagcttcagagattcgaaaaagggaagaaccacctccatgactttcaccccttcccattttttaaagctttcgagagccttacctggttttggatcacttttcatcacataagggagacctgtctttacgccctaccggaagggatcacacccccctt

SEQ ID NO: 40568 - DNA, 506 bp, Oryza sativa
  Clone ID: uC-osroM202029d10b1
ctgtgatgacagttccacttggtgcgatgatgcctgtgagcgggataaatgttgcattcaaccgtgaggtgctgggacctgtaatgttccctgctctgcggctgcgcaaggaaggaaagcacagatgggatacacttgaagacgtttggaatggcttgtgtgctaaagtggtgtgtgatcgcttacggtatggcgtgaagacaggtcttccttatgtgatgagaagtgatgcagaagcaggtaaggctctcgagagcttgaaagaatgggaaggggtgaaagtcatggacgtcgttcttcccttcttcgaatctctgaagctatcgagtacttcagttactgttgaagactgtgttaaggaactaaccagcattgtcaaggagaaactgggaccgcagaatgcaatcttcgctaaagctgctgatgcaatggaggaatggaccaaacttttggaatctcacggagctcacagcgcttaggctgaaattggctatctgttatgagca

SEQ ID NO: 40569 - DNA, 462 bp, Oryza sativa
  Clone ID: uC-osroM202029d11a1
aatcacgaatcaagtgctttacaattcaaatcatgtttgtgctaaaaacaaatggtgtgacatacaagcaaataactcaaatcaaatgctctaatatagcaaatcacgaaagaacatgttacgcggaaaagagtagatgccttttaaacatcaccgtctctgcttaatctccaaattcttctactcgtttcaaactgcatcagcgcactgcttggtgacgcacgccgctcggcttggctggacctggcaagcggccggcgtgatctccggcgcgcttggcgctgtcgccgccgctgccggcggcggcggctggtgtgggtgcgggtgcgggccgtacggcatcggcggcggcggcatgcccgggtgtggggcgccgtggccgacgtagtagccgccgacggggtgctgcgcccgcagcttgttcgtctgcagggccgtgacgtagacgacgaagccgacgac

SEQ ID NO: 40570 - DNA, 519 bp, Oryza sativa
  unsure (1)..(519): unsure at all n locations
  Clone ID: uC-osroM202029d11b1
cttcgatgcaggcggcgatgccggcggcggtgacgcacgacgacctgtcgctgcggaaggcgcaggagaggcgggcggcgcggtcgagcgggcgggcggcggtggcgctggtgtcgctctcggtgctctgcggcatcgtcggcttcatcctctgcctcgccgccgaggggtcgcgctccgaggcgtcgcactacctcatgaccgtcggcggcggcggcgccaacgcggcggcgaacaacgggcaggtggacgtctgcttctacaactccagcggccgggcgccgctggcgttcgccatcggggcgttcctgatgctcgccgtcgccatgttcgccgagcacgcctacatgctgctcgccgtcgccgcgccggactcgtccgcggcggggctcgccgtcgccgagggacacccgcgcgtcccctccgaccccgccaggctcacctggcagacctgctgcctcttcttcgtcacctggatctgcttcnggctcgcggaggtgatgctcatggtcggcatcg

SEQ ID NO: 40571 - DNA, 473 bp, Oryza sativa
  unsure (1)..(473): unsure at all n locations
  Clone ID: uC-osroM202029d12a1
ttgttttttttttttttaccggaaccagcaattggtatattaactcgagcaaacttaaaatgctcgaaaaagttgttcagcaacgaacaaaaaaaaagctctaagcaaaataaaactaatcacattgttgcccaatggcagataaactttgagcataccaactgacgacggttacaaaatcctaccagctgagagcatcttcctcttgtttattggcccgggggaaaaaagggtaaaatgcggctaactctttcgagtttatgctcagttattagcatcaaagatgctcaaagagtnaaaaaaaaaaaaaaaaaacgcagccgtgtaggcgtgtgtagcttcaagcagcaaccttcttgcagtggttctccagccactccatggtgacactcttcggtctttcgagcggcaggccaagagcacggtcccaaatgagctgagatcctattccaatgctccttgaaactccgaaa

SEQ ID NO: 40572 - DNA, 484 bp, Oryza sativa
  Clone ID: uC-osroM202029e01a1
ttttgttttgcataagaagtgaggacagcggcaataataaaaagaagcaattcctgataagaaaagagtccatagaagggtaggggaggcaaaaaccggtgaacacaatggcatctgctgtatcacggccaccagcggaatacaagactttcacttctgtgaatgcaatcaacgatactaaactaccaacttgctttcctcttggtttattttggcactgtagatagatactaccctgacactgtctatttggtgagggccccatacagaaatccaccgttttggtcacggaggacaagatctctccccccttgcgtcgggaaccaagggcatcaacaaagcaagggagaaacgggaaggagaggagcatcgacaagcaatcatctcccagtaagcaccaagcactgccatgtttgccaaccttgtagtcctacccctcagcctgctgctgctgctgctcctcctccttgggaatgtggaagcc

SEQ ID NO: 40573 - DNA, 307 bp, Oryza sativa
  Clone ID: uC-osroM202029e01b1
gcctagcgcccgccacctatttcgcggcctcatcccccccacctcttctgctcctctccccaataaaattccccgcacgaatcgatccccccctcggatccggatcgcctcgcccacccgctctgcgccgctcgtcgatcgcgattttttttttcttcgccggatttttttttctcccgatcggtggggagggctctctctctctctctctcttcaccctagggttagggggagcgccggcgcatttcggtccgccgccgccgccggagtcgaggagctagggttttcgtcggtcgggggggaagag

SEQ ID NO: 40574 - DNA, 472 bp, Oryza sativa
  Clone ID: uC-osroM202029e02a1
gaatattgaaggtttttattgaaattatgtttacaaggggagacaattagagatatatagttcatatatatagaataagagacactgggtaggggcatttatacaaataataatagatgctgcccatactccatcaaatgttcttcttaaacaaaatctgaaataggttaatacaaaatcatgtgatctccacacaataaaaactaaggttactttcagatcaaagaactattgtcctgagcttctctctgaatctacatcgtcagttgtccatccgcagattcttccttccccagttagtcaggctctgactctgcaaaggatccttcttccaattgacatttgcccgtcttacagctatcttcatacccacacgttcatacatcattcagttccatcatgcaccagtgcattcgtttattcatcagtctcatcttaatacaaaatctataatgaaatacccacaagttac

SEQ ID NO: 40575 - DNA, 475 bp, Oryza sativa
  Clone ID: uC-osroM202029e03a1
aaataagcttttgttttttattgctgaagagtacattaatttaagtgttgcattcatggtaagaacaagaacaactatacagagtttttggatgtacgaagttgagtactcacatatgtcaacgtcatttacctagacaaatttgaagaattcagcagaagaaagattatgttcttggttttccatagtccacatcatggtccacatttggagggaaaatgaaaattgagacagtaccgagtagatatctccatatatttgaacctctgaagagaacaatccctgatacaaattactgatgcaaaaataagttgttttcggcccccatagacattatgaaattcctcttgacttgaatacagaaaggattcaatcatgcactaccttttgtacagggagtatttgaatgtttatttggtaacgatgccatgttctcgcagccgacaatggagacagtttccaatgatgagaagga

SEQ ID NO: 40576 - DNA, 461 bp, Oryza sativa
  Clone ID: uC-osroM202029e04a1
ttttgtttttttttttttttgtgtttttttttttttttttttttttttttttttttttttttttttttttttaggaaaaaaccaggccttaggattcaacacgggctttgggggggaccttttttccatgggccctttgtggccggaaaaaattttccagccaaccagggtttggtatcccccgattttccaaacggggcccaagcccataacaggggggaacccgggggatttttacccccccccaaacgggagcccaagggcaaggtgccccccaaaaaccctttttacattgtaggagcccaaatcaaccagggtgaacgttttaaccattttaaagggaagcccccttgaagggccgagacccttgcccccagcaggcaacaagggaccccgggtttccaaaacccgaagggcccagggggggcaattaaaaaaccctgcaaccccccatggaaacc

SEQ ID NO: 40577 - DNA, 453 bp, Oryza sativa
  Clone ID: uC-osroM202029e05a1
ctccttatgttacctaagcagttcgtgtgtgctaatagtgatgatgcgattaattttgcacgcatggatacatcacatgtctctacacgcaccatattaccagccgggccactgacaggtgggccccactgtcagccacactcgcgcctcttcttcttcttgctctagctatggcgccaaaacgaacaaaggaaaaaaaaagaatcgaatctatggccgcagcggccggaggtggacggggacgccgtgcttggggcggagggtgagcacgttctccggcgcgtggcggtagttgtcggagatggcgaagcggaaggccgagaggagcatggcgaggacgaccttggcctcgacgagcgcgtacgcctggccgacacagttgcgcgggccggcggcgaacggcaggaacctggcggcgccggcagccgacgggcggaacgcgcccggggcgaa

SEQ ID NO: 40578 - DNA, 346 bp, Oryza sativa
  Clone ID: uC-osroM202029e05b1
attttcaagcgggagatcaggcggttcaacggcgagctggaggcggcgctagatgattcaatacggcggatcagggagatcgccgactaggggaggtctacagacgcgacctacagcaggggggtgctggctctgcttctgtcggggatggaggacaaggagacgaatgcaggcacgctacgaggacagttcagctacgacggaacagatgatgagcgacgagtgtaaaaccttacttgttaaccaccactagcacgtgttgactgctgctcacgtgggcgcaacatggtgattaccaccaaccctgcttggaccgagaaggccccccccgaggcaccttgcatgc

SEQ ID NO: 40579 - DNA, 471 bp, Oryza sativa
  Clone ID: uC-osroM202029e06a1
ttttgttgttcaggccgtaaaaaggtcacagcttgattagttaaatgactgcttgaaagttgaatcccacaacacactcaagcaacagtgccaacttggtaaagagccatttatagtgatgaaaatacagggtccaacccagttacagccccttccagtggggcttccatattttaacactacaattcatcggaatattcccgttcaagagcatgaagaggcgtaatcttgtcaccggataatttacactgccgcaccaggatcactgataacgcccaggaagtcatcttttattgtgccaatgcaaaaaatttctgttgcatcaacacgtgtcccaataatatttaaccgaacctaactatgtttttgaatttttaccgatccatcagaagtagtataatttggcacatccccagattggaactccatatcatcaggaatcaaatggttggacacgaagatctgcacagg

SEQ ID NO: 40580 - DNA, 487 bp, Oryza sativa
  Clone ID: uC-osroM202029e07a1
gccatgcggagacggagaagagggcgcgatcttgccagcagaggaagaagttgcccttctcctcccggaccttgaagccgtcgcagccgaggccctgcgccacccgccgcgcctggagcagcgcgtagtagctgagcgggacgcggccgaagccggcgccctccagccgccgcgcccaccgctccagccgctcgtgccgctcccgccgctcgccgccgtcgcacgccacgatgttcttgatctcctccccgagcagccaccgctccacgcgcgcgcgctccaccgacccgcgcgccgcccccacctccaggcagtcgaacagcgccgcgtagtagttgagcgcctccacgaacctctccgtcagccccgccgcgttgtggctcgcctcctgctccgccaccaccatcaccttcggcgacagcccccacagcgcgcccaggaacgcgtccgcgcgcgacgtcgacggcgacagcccggactccgggct

SEQ ID NO: 40581 - DNA, 479 bp, Oryza sativa
  Clone ID: uC-osroM202029e08a1
tttgttttttttttttttttttttttttttttttttttttttttttttttttttttttttttacgcgcgcagcatgcattttatttaggggcgggccacaattcaaacatgtataggggaaacctttgggggggagaaactcacgggatatgaggggagtcggggggacagggaaatagtcaaatttgggcgttttttaatgccggtcgttgactttgttgacaagggcagggtcgggcaggccaaatctggggggaccccacaaagggcggggccaccgacgatggggaaaatccggatgtagccgcgctcgccccatgaatggccccaagagttcttgatgggccaatacttggggccggaagacccgttggtgccccaccccaccaccgtgacggggtgggctaagggcgtgccaaacgggcccctgaaaaccccacccttggagaaatgaatcccgctaccgaccttgatgggca

SEQ ID NO: 40582 - DNA, 543 bp, Oryza sativa
  Clone ID: uC-osroM202029e08b1
tggtaacgcgtacttacccacaagttaggtgcatgccatggcaccattcatggcgtgcgcctcgccaccggtactcacgctggccctgctcgcgtcgtgcggtgcccttctcgccacctccatgctcccggcgcgtgcgacggcgggcagttgcttggacgtcggcgacatggtgatgatggacaggttccgcgcttggcagggagctcacaaccggtcgtacccgagcgcagaagaggcgctgcagcggttcgatgtgtaccgccgcaacgcggagttcatcgacgccgtcaacctgcgcggcgacctcacttaccagctcgccgagaacgagttcgcagacctcaccgaggaggagttcctggccacgtacaccgggtactacgccggcgatggccccgtggacgactccgttatcacgacgggtgccggagacgtcgacgccagcttctcctaccgcgtggacgttccggccagtgtcgactggagggccccaggcgcccgtgtgcctcccaagtcccaacgtcacatgcagtaactgct

SEQ ID NO: 40583 - DNA, 471 bp, Oryza sativa
  Clone ID: uC-osroM202029e09a1
ttgttttttttttttttttcctatgaaaaaaaaatacatatataccacaatagatatacacgaacaaattaatattccgtgactaataatgttattggggcggccatggtatattagacgagatcctccctcatcctggcggcgaagtcgtcggcgtggtccttggtgacgcagctcgccagcagccgcgtgccggcgagcggcgccggcgcccgcatgacgatcaccgacgagatgaggtcgcagttcaccagcggccccgccgacgacggcgcgccgtacccgtagtcgacgtcgttgaacccgagcttgctccagtccgacacgtacacggactcgtagtcgaacgtcatctggaacgggtcggcgccgccggtgcgcccctccgcccagctcaggcactcgccggccatccgccgtttcgcctcccggaccacgccgacgagctcgatcaccgacgacgccgtcacc

SEQ ID NO: 40584 - DNA, 520 bp, Oryza sativa
  unsure (1)..(520): unsure at all n locations
  Clone ID: uC-osroM202029e09b1
ctaagctttgcttgatttgcagcagcagcagcagcagcagcagctaagcttgcatccatgggcgtcttcgccgtcaccaaggtgtccgagggccccgtccggccgtccgccgcgacgccgtcggagacgctgccgctcgcctgggtcgaccgctacccgacgcaccgcggcctcgtcgagtccgtgcacgtctacctccgcgcgacgacgccgccgtcgaggcggtggcgccggtggccgacgacggcggcgtcgtagtcgaggggaagaagaaggagaagaagccggcggcgcggtggtgcgcggcgcgctggcggacgcgctggtgcactactacccgttcgcggggcggatcgtggaggacgagcggtcccggnggcggcccgccgtgctgtgctccggcgagggcgtctacttcgtggaggccgtcgcaactgcaccctcgccgacgtcaaccacctggagcggccgctgctgctgtccaaggaagacctcgtgccgtgcccgacgcccgagcagt

SEQ ID NO: 40585 - DNA, 471 bp, Oryza sativa
  Clone ID: uC-osroM202029e10a1
tttgtttcgaaagtctgtaagtagtgaataacaaacataatccgttcaaaggcgacaaggtcacacgcaaaccatcaacgcctaaacgtaggacacagaaggcgagaacgacacaagtcagtcataggggcgcacataatggtaagacgccatcacgcattcggcagcagaggttaagcctcgtattctgcacatagcgggcggcggcgcgcgcgggctttagaagaggaaacttcgcagagccgctgtaaacggactccgattcctacgaagtccggcacaaaaggatacagtaaatgtgttcgtgtaattgtagacgactgaacgaagaacgaggcaggaggcacatggtctgctgcggcgatggcaccaacctacagcgagatgcgcaacggtggcgtctgatcggtgtaaaggtcatagttcggctccacctcataccgctttcgcagtatgcggtatccaaacatc

SEQ ID NO: 40586 - DNA, 479 bp, Oryza sativa
  Clone ID: uC-osroM202029e11a1
gcgctcctgctggtcctggcgctctccgccggggccaacgacatcgcgtcggacgccgcggcgctgcaggcgttcatcgcgccgttcgggtcggcgaccgtgtcgtggaacacgtcccagccgacgtgctcgtggacgggcgtcgtgtgctccggcggccgcgtcgtggaggtccacctcccgggggttggactccgcggcaacgtccccgtgggcgcgctcgggggcctcgacaagctcgccgtgctgtcgctgcgctacaacgcgctctccggcccgctgccgtccgacctggccaagtgcgcggagctccgggtaattaatctgcagtcgaatcacttctccggcgagctccccccggagattctggctctcccggcgctgacgcagctcaacctcgcggagaaccgcttttccgggaggattccggcgagcattgccaagaacgggaggctacagctgctctacttggacggcaa

SEQ ID NO: 40587 - DNA, 449 bp, Oryza sativa
  Clone ID: uC-osroM202029e12a1
tttgttttttttatttactgggcaactaaagcaactattataatgcaaagaccaaactcctcgttcttacaacactcactcaacgatacatcacaagatataaacaggggcgagcgagcaaggcaggaggcactagagtgacaccaagcgattatactgaattacttatatataaaccatgcattccagacacaccattcatcatcacatacaccaccatggcacaagaccagaacgcaaccccctcctccaggcaggagatcaggatacattcccgacttcacagcaaaattaaatcaggaaggaatacttcgctctaagctcaaccagatctaggagtcccatgttcttccaggcttctgcctaggctgcgaggacgattatcactctgagcaggaccaccccgcatataaccagcagcacgcatatcagcgaagagttcgacttct

SEQ ID NO: 40588 - DNA, 556 bp, Oryza sativa
  Clone ID: uC-osroM202029e12b1
gtcacgtctccgactccggctcgatttccaccccccccaaatcctcctccggcgagcggccggccgcgagacaccccggactctcccgcgcggcgattcttcggtaccccgatcggaggaggaggcggcggggagggaggaggaggatgagcttccaggacctggaggcggagaacgcccgcgggctgccgcggaggggcggtggcggcagggcgggcgccgcggccgccggggcgggggcgtcgcaggccgtggcgtcgggggtgttccagatcaacacggcggtgtcgacgttccagcggctggtcaacacgctcggcacgcgcaaggacacccccgacctccgcgagaggatacacaagacacgtcaacacataacacaactggtgaaggacacatcggagaagcttaaacaagctagcgaggctgatcatcgtgtcggagtcagcgccagcaaaaagaatgctgatgcgaagctagcaaaggatttccagcagttctgaaagaatttcagaaagctcaacggctagcagtagaaagagaagctgcttatgca

SEQ ID NO: 40589 - DNA, 479 bp, Oryza sativa
  Clone ID: uC-osroM202029f01a1
tttttgttttttttgaatattgagggtttttattgaaattatgtttacaaggggagacaattagagatatatagttcatatatatagaataagagacactgggtaggggcatttatacaaataataatagatgctgcccatactccatcaaatgttcttcttaaacaaaatctgaaataggctaatacaaaatcatgtgatctgcacacaataaaaactaaggttactttcagatcaaagaactattgtcctgagcttctctctgaatctacatcgacagttggccatccgaagattcttccttccccagttagtcaggctctgactctgcaaaggatccttcttgcaattgacatttggccgtgttacagctatcttcatacccacacgttcatacatcattcagttccatcatgcaccagtgcattcgcttattcatcagcctcatcttaatacaaaatctataatgaagtacccac

SEQ ID NO: 40590 - DNA, 488 bp, Oryza sativa
  Clone ID: uC-osroM202029f02a1
ttttgttacaacaacattttctggatatattccatacatatatattcacacagcactgaagccgtctgaacgtatcaaaaaacaaatgatgatacaacatttgatgaaaacccatggacatgctattcggctcctaactgctgtcgtgcagcagatggacgacatactgaccagaattttctcgagtgaaccaactcctgcaacttttattcactagtatctctacaaatgaccaacatccaatgtacaacagcataagatcatccaatgtacgacagcatatgatgatccggcatgaaaaaggcaaaaatagctcatggagaaagcaagcattatccccttcttgattcggagataatatacaattcccccatgcactgcatagcgttccgagtgcctcttatgagtcgaattgcaaagaatggccgacaatttatatgtagcaatattcttatcggtgacctctcctccttgatgcaatgcgggct

SEQ ID NO: 40591 - DNA, 480 bp, Oryza sativa
  unsure (1)..(480): unsure at all n locations
  Clone ID: uC-osroM202029f03a1
ttttgttttttttttgttcaaggcaaaatacattactactggactgaatccagtaaattatgatatttttacacgatccatctcaacatgacagagatcaaatgatggatcgatcagtggtacataaacaccaagaggaccaggttttcatagacttatttgacatcattaacaaccacgaccacgataattgacgacgatattgccgacatgatcgatttcataggactatttgaccagcagtacgaagaccccgtaaaaggagcccacaaattaagagtacataaacttaatatatagttttgatcataagatcggcagaagtccagattcagaatctaattgacaaacacaaacgccgcaatataattcggtaatcaagcaagccatgatatcagctgtaccaacatcatcctccggctaaacattcatnaaagacgacgtgattaacaattgagcgcacaaactgcatcaatggag

SEQ ID NO: 40592 - DNA, 483 bp, Oryza sativa
  Clone ID: uC-osroM202029f04a1
ttttgttttacatctaacaatggctagatgctttcatcaacagaagtagcggataaaatcatgtaaaacacccattggctcctgcccacagagcagcaaaactttaaaagattgaagtaacaggtctgcggaacaaattattggccattgctttgcaaaacaaccaaagaattcgaaatttaacagccatcaaccacagacgatgttatcagggcctgagtgcaagcgctagaccaaacttggggggtctgtccaaggccttggtgtcgaattcaccagagattgtcaaaaccgacttgggtttaacctcatgctggagaagagcagcaagctttccagtgttgttgagccttgccttcacagctgtctcggggtcaaccttgtacaggccaccaacagtgagagtgttctcatttgttgagagcctgcgggttaattcagcaacaacagaggatttctgcttatcatcaaggtgatatacac

SEQ ID NO: 40593 - DNA, 516 bp, Oryza sativa
  Clone ID: uC-osroM202029f04b1
gttctttcatccacaaagcttgtgacaagtgtcaagctgcctgactacaattctggaaaggtggagatgcaatacttccatgagaatgcaagttttgccactgctgatggcatgaagccatctcctgtggttgaattttctggaacagctggtgctcaaggacttgcctttggtgcagaagctgggtttgacactgctacaggaaaatttaccaagtacagtgctgcgataggtgtaaccaagccagattatcatgctgcaatcgttctggcggacaaaggtgacaccgttaaagtgtcaggtgtatatcaccttgatgataagcagaaatcctctgttgttgctgaattaacccgcaggctctcaacaaatgagaacactctcactgttggtggcctgtacaaggctgaccccgagacagctgtgaaggcaaggctcaacaacactggaaagcttgctgctcttctccagcatgaggttaaacccaagtccgttttgacactctctggtgaattc

SEQ ID NO: 40594 - DNA, 449 bp, Oryza sativa
  Clone ID: uC-osroM202029f05a1
ttttgtttttttttttttttgggtttttttttttttttttttttttttttttttttttttttttttttttttttttttttttttttttcatcccccccccaaaataaaaaaaataaggagggggggacccaaaaaaacaaaaacaaaagccccccaaaaaaaccccacgggcccaaaaggggaaacaaaaaaaataccgcggccccccaaaaaaaagaaccggagggaaacccccatttccaggacaccccccaaaaaaagaggcccccgcttctggggctgcccagggcagggaggggaagaaaaaaaaaccctccaacatgtggggggtggggccccccccccccccacggaatttcccccaaggggaaaccaacccggccccccagggtttcgtccaagagcccgaaaacacccctccgggggggagaggggggcccccaaccatt

SEQ ID NO: 40595 - DNA, 479 bp, Oryza sativa
  Clone ID: uC-osroM202029f06a1
ttttgttacacaatcatgtgggtgttacattttcatagttatgtcgcctgacaaataaacaaaatcaagcttttgacagccctattccacctttgtacctgactgcaatgaatgtaatagaatgaaaatatacatgtatgcaaccttggaaccatatggaagaactactttccctgctccatttcagtgcactatcgtgatacacctctacaattacaacggaagaagtgactttctcatgaagattggaagatcggttggtcagcgaaaggaccatatacccaacctctggcaatgtgaccgtaagccgcctctgtcaggtgaatgccatcccagctccaatgggttgatggatcatcacacgcggttgcaccagcctcaccacatttggctgtgacattgaagttgtaagcggccttcgcaacggacccaggagccccgcagcatgccctaggtagctgcttgtaaaatccaaactt

SEQ ID NO: 40596 - DNA, 473 bp, Oryza sativa
  Clone ID: uC-osroM202029f07a1
caagctagttgtgcatggttgcaacacataagtatataattagacaagccaatcacataaatatattatacaggtgactgacccccaaccaaaaccacttcctgtatctttcacctaaccgtcaatctacaaagccctcaactcaaaacatcaactccaaacccaaaccaagtcaaccattccagtgcttacaagtcaataccagcagacaagctaaatacaatacatcagtaatgtacatacaaatgcgagaaactcatagaatagtgctccattaacaggtgattacttggcaataagaccaataaattgaccagaaaaggtactgaatttatcccaaagaaggggattctggttcagaaccactaatggatgtgaaagtggatagcgagtcgtcaccgaagttcaattgagtagctgatagcctccttgaatcactaaagtatctattatagtgaccagaacacgatctg

SEQ ID NO: 40597 - DNA, 566 bp, Oryza sativa
  Clone ID: uC-osroM202029f07b1
tttctctcctttcacttcttctctcctctccgctgtggtttcttgctggttcttggaggcctccacttggttaaatgatgggtgtaggtggtggtcttggtatggaagctactaactgtggtgctttgctcagggagcttcagcaaatctgggcagaggtaggagaaagtgaaggtgagaagaacaaggttctgtcagagatcgagagggaatgcttggaagtgtaccgcaggaaggtggacgatgccaatcggaccagggtccagctgcaccagtctgtggccaccaaagaagctgaagttgcatccttggttgccactctaggggagcataagctatatctgaagaaagacaagagtgttgttccactcacagaacaacttgcggcagtcgttccagtacttgagaacttaaaaggcaagaaagaggagaggctcaagcagttctctgacattcaatctcagatcgagacaatccgctcggagttaagtgaatatagcgatggcgatgttaagcaaatagtctcatcgtcgatgaaaatgattatcaacaagaagcttacatta

SEQ ID NO: 40598 - DNA, 466 bp, Oryza sativa
  Clone ID: uC-osroM202029f08a1
acataaacaccatcttgatgtaataataattgccttaattactttagcaattgggttgttacatagactgctccggcgagcaatgatcaccaggaaatttcttctggtgatcccttgatccttgatcatttatccacaacacaatcacataactgcacccgaggctttcatcaggtgctctttggtcaatttctacggcattttcggtgacagcagcagctgatcatgcaaccggcggccacatcacggggtccttggacgtgtcgagggacgtcggcggtatccactgccagaacgcggccggcggcgcgtagctggtggcgtacggcacgtacttgccgccggcctgcgcgaacgccgccggatggtacgccggtgcggccgccaccgccgcggcgtggtgcgggacgaacggcgctggagccgccggtgtggcggcgccgacgcccttgagcatttgctccag

SEQ ID NO: 40599 - DNA, 483 bp, Oryza sativa
  Clone ID: uC-osroM202029f09a1
ttgttttcgaaagtctgtaagtagtgaataacaaacataatccgttcaaaggcgacaaggtcacacgcaaaccatcaacgcctaaacgtaggacacagaaggcgagaacgacacaagtcagtcataggggcgcacataatggtaagacgccatcacgcattcggcagcagaggttaagcctcgtattctgcacatagcgggcggcggcgcgcgcgggctttagaagaggaaacttcgcagagccgctgtaaacggactccgattcctacgaagtccggcacaaaaggatacagtaaatgtgttcgtgtaattgtagacgactgaacgaagaacgaggcaggaggcacatggtctgctgcggcgatggcaccaacctacagcgagatgcgcaacggtggcgtctgatcggtgtaaaggtcatagttcggctccacctcataccgctttcgcagtatgcggtatccaaacatcgcgaccagcacg

SEQ ID NO: 40600 - DNA, 482 bp, Oryza sativa
  Clone ID: uC-osroM202029f10a1
tttgttttttttttttttttttttttttcagcaaaacttaaccttttattttgcttcaaattaatcgcaggacacctctacccccaactttgcagtccaaaattacaatggagaattacagcatgaagaaaactaataacaggaggagcaccgcatacatacacatgtgccctaatcaaggtagcagtggttaagacgcctgcctgccgttttgcttcaatcaacggaatgtctcatcatcagtactacaacacatgaaagctcattgggaataaggcgccagcaaagggataagagctcacaatttacagatgcttcgtcctttctttctcctctagggcctttgtcttgcggtaatctttatcagtcccaaacagccagtccatgtagatgaaggtcgacgagtaattcccagacttggtgtagagaacacggtgatgatagtcatggaattcagcgccgccatacaatggcaagaaata

SEQ ID NO: 40601 - DNA, 585 bp, Oryza sativa
  Clone ID: uC-osroM202029f10b1
acaatacaagagatgattaagggaagggaatcctcctcctcttcaataaaaaggaagggcagagtgcagagagaaaggagatcccctgatccctcttcctcgccggcggcaatcgctcgccggagtcaaggtaggatgatggcggcggcggggctggagtcggcgtgggagtacctcatcacgcatttcagcgagttccagctggcctccatcggcaccttcctcctccacgagagcgtcttcttcctctccggcctcccctctctcctcttcgagcgcctcggcctcttctccaagtacaagatccagaagaagagcaatacacccgattaccagaacagatgtgtagtgcgtctcgttctctaccatgtctgcgtcaatctccctctcaccattttatcatatcgcaccttcaaattcatgggcttgaggagcacccttccgctgcctcactggacagttgtcgtctcccaagtgctcttctttattgtgcttgaggatttcatattctactggaggcatagggcactgcataccacatggctgtaccagcatgttcacagcgttcaccatgaatatgccaca

SEQ ID NO: 40602 - DNA, 479 bp, Oryza sativa
  Clone ID: uC-osroM202029f11a1
tttgtttggaatgaagatatatggtatatagctatcagggaaaaagatacaaaaaaatgtacatttgttgatttatggtcagcactatgcaaccatggtgatctcaaggcgcaagtatatatcatgtctgtaaatatatctttttcaaaaaagtttttacatctctataggcagtgagatgcatgctaccaaggcttcaggtcgcccaccggtccagcagtccagttcagggccctctccccgggcttcaagaagacgttttcgccatgtggaagcttgcgagcgagaccattcagtatctgatggaatgcatctcctgcctgagcaggctgggggaacagcatggcctgcttcatcgacgggttcgcgagaagcctctgcttcctcaggataacatctgttggtatggatgtcaggatactgtccagcttcggaacatcctcctcggcgacaaacacgccaatctcctcccaggggat

SEQ ID NO: 40603 - DNA, 541 bp, Oryza sativa
  Clone ID: uC-osroM202029f11b1
agtgggttggagaggagaggagacacaggtgctgggaagaggcctgtggggatcaagaagatgaggaggtgggtcttggccattgccattcttgctgctgctgtatgcttcttccttggagctcaggcccaggaggtgcggcagggccaccagacagagaggatctcaggaagtgctggtgatgtgttggaagatgaccctgttgggaggcttaaggtctatgtctatgatctcccaagcaagtacaacaagaagctgctgaagaaggatcctaggtgcctgaaccacatgtttgccgctgagattttcatgcaccggttcctgttgtcaagcgctgtccgaacttttaatcccgaggaagctgattggttctacacaccggtgtacactacatgcgacctgactccctccggtctttccttgcccttcaaatccccaagaatgatgcgcagcgcaattgagctgattgcaacaaattggccttactggaatagatcagagggggctgatcattcctttgtacaccacatgactttggcgc

SEQ ID NO: 40604 - DNA, 479 bp, Oryza sativa
  Clone ID: uC-osroM202029f12a1
tttggtttttggagaaagtgggggttcaataaatattgcttcacttgtacaaagttcagatcaaaatacattgatacatgacacggaaagagccatgcacaccacttatttggacacacagagggcaaggctgcagagaaaatcaagcaacacaagctgaactcacggacccacctgtcagcctctcactggtcgaggccggagactcttgtgaaaaacagcaacaccacgcatgcagaagaagacaaattattacacacacaaatcgacgacacggtggccggcgacttacggagaggtcgccaccgacgccggcgacgttgcgatgaggacgatcagtcgaagaggtggtgctttttctcgccggtggactcctcggcgctctaggggtccttcttactctcgaggtgctcgtggaatgagtagccgccggtgccgaccggcgccgaggccgcgatctactacgagatcttgaggct

SEQ ID NO: 40605 - DNA, 488 bp, Oryza sativa
  Clone ID: uC-osroM202029g01a1
ttttgtgtagatctaaaacaaggcaaagcactgtgctcatcaaatctgataagagtacccaatacaaaaagagagcagtctacaccttgcatgtcagcgtcaatttgaacatctaaaagccggacccagtgtgtctgggtaatctgtcgaattttcgtctcaaaatggtggtacatttacgaaagaactttctggacttcagcagttacttctttcggtggcttctcggcatgaagattggccaccaaggccttcttggagtagtagtcaatcactggttcagtttgtttgtggaaggcttcaagtctagacttcaaaacctcagctgtgtcgtctttcctttgaattagtggttctccagtgacatcatcaactccaggaacctttggaggtgcaaacttagtgtgataactcctgccactggagggatggatccaccggccagtaattctttcttccaaaaatgaatcatcaatggcaaagttaag

SEQ ID NO: 40606 - DNA, 422 bp, Oryza sativa
  Clone ID: uC-osroM202029g02a1
ggagcatcctcgtgcatgcctccggccatgtgagctccggcgccctggtacatcttggcgatgatggggttgcagacgccctccagctccttcatcttgtcctcgaactcctcggcctcggcgagctggttgctgtcgagccagctgatggcaccgtcgatggcgtcctcgatcttcttcttgtcggcctccggcagcttggacgcgatcttgtcgtccttgatggtgttccgcatgttgtaggcgtagttctcgagcgagttcttggcgtcgaccttcttcttgtgctcctcgtcctccgccttgtacttctccgcctcctgcaccatcttctcgatatcctccttggtcaaaccggccttggcggctggggatggggatcttgttcttctgcccgggggtcttgtcctccgccgagacac

SEQ ID NO: 40607 - DNA, 475 bp, Oryza sativa
  Clone ID: uC-osroM202029g03a1
tttggttttttttttgatcgaaggcccagactttgattgatgtatgtaagttctttattcagatcaagcgactacatgatggcaagtgcgaccaacatgaagaaatgcactcgggacgccattctttccaagcccccctaaaccatggaagcacaatttgcacaatgctggagccgttcatggctcgaacccatgttttcggcctccctcttgatcgattcgaagaggacagacgacaggtagcgctcaccgaagctcgggaagaccacaactacgagcttccctttgttctcgggccgctgcgcgaccctgatggcagcgactgcagcagcaccagatgagatcccaaccagcagcccttctttcaacgctagctgcttcgccatgctgatggcttcatcacttgagacttggaccacttcatccaggagattgacatcaagtacaccaggaacaaaaccagcacctatacctt

SEQ ID NO: 40608 - DNA, 496 bp, Oryza sativa
  Clone ID: uC-osroM202029g04a1
gctcaagaccccgcgcgtgctggccgccgcctggtccccgctcgccgcggtcctcgcggcgtccaaggccgcctccaagtcctacaaggccgcgcgcacgctcggccccgccgcgcgcctcccttccctcccctccgacaagcgcctcaaggccgccttcgccgccgcctcgctcctccgcctcgccgccgccgcgccgccccccgtcgcgtcccccaccggcgtcgcggccctcgcgatactcaagtctgggtacaagctctccaagaactcggccaaggtcatcgagggtttcctcggcctccaggtgcacaagggcatcaggaatggtgtcgacgcgctcggggtggtcgtcaaggtcgccgtcatcgcctccgaggtcgccgtatgggtcggcggccgatgctggggcggccggcgtgggcgctccgtgcgatttctctgctctacccgcccgagcggtttactccttgttcggtacagcaaatctgaagca

SEQ ID NO: 40609 - DNA, 482 bp, Oryza sativa
  Clone ID: uC-osroM202029g05a1
ttttgtttttttttttttgagggaactctgaaagcaaaatgattttattaactttcattattccatgtgaataattcctaatgaaattatccatgcctcaaggttactcacatttgcaacgacttatccctgagaccctgaactacgaagaatcacggtaatgcacactgatacaaacaatgaaacaaatcgacgacggcaaacgcgcaacactagcaatagcacacgtatatcgatctaaagaatgcacgcgagactcagatggagatgctgttggggatgcccatggcggtgagcccttggcccttctccttggtgacatccgacgtgttggggtacagcagcatgtacggcatcttcaccggcccgttccggttcttgagcgccgagttgccgttcatgtccttgatccggttctcgatatccaccagccggctgccgaacctcttgaacgcgtccagcgccttggcgtccgacgtcca

SEQ ID NO: 40610 - DNA, 436 bp, Oryza sativa
  Clone ID: uC-osroM202029g06a1
ccagtatcttctaaacaaagatgcaaacttaccacggttcactgatttatttcactacaggctacaggtacagaaaatttacgcgcatgtcacagattgcacacaatcggaagcaaaaacagcatatgacgaaacatagggacaagctagttagcttcacatttcacattgatcacagcgtcatttgtcctggctactttcttctccctcgtaatccatcaacttccaggggccatcggcgcccctcaccatgcccttgtccctttgcacgctccacgacggcgggacgtggtactcctccttgagcgcgtccacattcttgttaccagcgccacgtcccggtcgacctccagtttgaacccgccgcgcttgccctgcgccccggcgacgccgtgcatgtagcactcgaggctgtgccacaccgcctggttccccg

SEQ ID NO: 40611 - DNA, 488 bp, Oryza sativa
  Clone ID: uC-osroM202029g07a1
ttgtttttttttttacacaggacacacaattaatgttaactgttagtctaggattaaatcttccaatttcacaagacattcgtccgtgacaaagttccctacactcaacttcacaagcttagatcttagattcggcgtcggtttcgcttcttgttctttcctccaccgccaccagagggtgacgacgtttgcttcggcttcttttcgtccttcttcttcccatctttcttctcatccttcttcttctcatccttcttgttgtccttaccaagatttctcacttggtcaatcaaaaactcaggaatctcaacatcaccgcgcttttcgaacaagacttgctcacagaactcttcgagcgagatgtcttgatcatcgaagtcttgaaagctgtcgcttccagcaacattgaactcatccacctcggaattcgattccaaagtgttggaagcattagcaagttgaagggtgcatgccatgcccaaaagtgc

SEQ ID NO: 40612 - DNA, 319 bp, Oryza sativa
  Clone ID: uC-osroM202029g08a1
acgaagctagacccttttgagcgcgcccctttttttttgggtttttacgacaggggggaacacatcccaagtcaaattggctacgatggggtagaaacgcgctaacatctaatgcatgttggcctcgaaattctcactctatactagctggatgatgccgagccaactgtaggcaccggcagctgctgttgttacgttattagccctagcttccgagaatggacgcggggtctgcacggctctgtcgctgtccccgaatgatgaatgtgacgatgtccagcaaggtcctgggggccaccctcaacttggggttcccggt

SEQ ID NO: 40613 - DNA, 487 bp, Oryza sativa
  Clone ID: uC-osroM202029g09a1
tttgttttttacaaaatacctgcaaatgcattatcatctacagtatgatccctagtacacagcaaagattaaaattcagcgagagttggctgcagaaatgcagatgcagacagaggcgagaaagcagagtctactctaaaattcagcagcagctcttgctccgggcgcaagccctcgccgccggcggctggccgcgggggctgcacggcccggcgccggcgtcggtgagcatcttcaccacgtccctcatcgtcggccgccccgccggcagcttggcggtgcagagcacggcgaccttgagcaccttgatcatgtcctccctgtccctggccgccgctgccgccgacgacgacgacgacaccgccgccacgcgcgggtccagcacgtcgtcgatgctctccgcggcgagcttggtcgacagccagaacacgatgtccttcccctcgccgaacgccgggtcgatcgggctccggccggtgatgagctc

SEQ ID NO: 40614 - DNA, 543 bp, Oryza sativa
  unsure (1)..(543): unsure at all n locations
  Clone ID: uC-osroM202029g09b1
ggaacaacctctccgggcagatcccggcggcgtggggcgagctgaggtcgctgaagagcttctccgcctacgagaaccgcttctccggcgagttcccggcgaacttcggccggttctcgccgctcaacagcgtcgacatctccgagaacgccttctccgggccgttcccgaggcacctctgcgacggcaagaatctccagtaccttctcgccctccagaacggcttctccggcgagctccccgacgagtactcgtcgtgcgacagcttgcagaggtttcggatcaacaagaacaagctcaccggcagcctcccgcggggttgtggggtctccccgccgtgacgatcattgacgtgtcggataatgggttcaccggaagcatctcgccggcgatcggcgacgcgcagagcttgaaccagctgtggctgcagaacaaccatctcgacggcgagatcccgccggagatcgggcggctcgggcagcttcagaagctgtacctgtcgaacaactcgttcttcggcgagataccngcgagatcgggagc

SEQ ID NO: 40615 - DNA, 482 bp, Oryza sativa
  Clone ID: uC-osroM202029g10a1
tttgtttaacaaaagccataggctctgtattaaagatccaacaggttcagagaacacgcaagctcagaactacacatcaccaaaattggagcaagtttgggggtacatatccgctcatacagtggaggatttatttctcgattctacgagctttttaactagagttcgaccgggaagtcaattacggatagaaatgagcatcctgtcttcacaaaacccatgcacacaacagtgggcatgaaccgcatgatattcaccatcaagtttagtagggctccacgggtgcgcggaacttggcaccagcgtagacagcagccgcaccaagctcctcctcaatcctaagaagctggttgtatttggcaaggcgctctgatcggcagggtgctccagtcttgatctgacccgtggccaaaccaacagccaaatcagcaatgaaggtatcctcagtctcaccactcctgtggctggtcatcacaccccag

SEQ ID NO: 40616 - DNA, 472 bp, Oryza sativa
  Clone ID: uC-osroM202029g11a1
tttgttttgaacccaataggggattctatcagattagcagtagcaccatgaattccatttgatagacagtgttgcatcaactgctacaagaagacatccagatacatcctatacggatctatcataaatatctgtgaacaatcaagcattacaattcaaagaacgcagccgactcaatgagtggcacaccatgagatcagtatgatttctatcttcaaaacattgtgccacctagctctgcctctggatatgcagcgagagtttcttaactttgcagctcatctttcttagctcattgtttccgtttgcttgctatctttgtggcttctcttccgcttcctaactctctttcgctttgcctccccatcagctttgggcccctgattttgagcagctgacaattggggctttggtttctttttcttacaggagagtgggtttggtccctttggtcttttcttcttaaatttgc

SEQ ID NO: 40617 - DNA, 425 bp, Oryza sativa
  Clone ID: uC-osroM202029g12a1
tgtgtttttttattgattggggtttttaacgccactctttgggaaaaggctcaccggctatatttaattcactcgaaaaaaagagtgaagctgataccaccgttccaaagctcaaccaccttgacagatgaaacaaaacaccggcattgcatcatacactaattaaggattctccaagtaaaaaaactccacatgttcggggatcgtaagggtacagagcgcgaggacaggtaacaacctattgggccaacgaacgaaattgggctgtgcagagaccgagcctttccttggggtttttggccctcaccaaaagttggacatgttcatcttccttttcaggggtctgatgattctgccatagagccgtcagggggagaacctccagaatgctcccaacgctctcagcagttttgagggcaaaaggg

SEQ ID NO: 40618 - DNA, 281 bp, Oryza sativa
  Clone ID: uC-osroM202029h01a1
ggagcatcctcgtgcatgcctccggccatgtgagctccggcgccctggtacatcttggcgatgatggggttgcagacgccctccagctccttcatcttgtcctcgaactcctcggcctcggcgagctggttgctgtcgagccagctgatggcaccgtcgatggcgtcctcgatcttcttcttgtcggcctccggcagcttggacgcgatcttgtcgtccttgatggtgttccgcatgttgtaggcgtagttctcgagcgagttcttggcgtcgaccttctt

SEQ ID NO: 40619 - DNA, 236 bp, Oryza sativa
  Clone ID: uC-osroM202029h02a1
tttgtttttttttgatttttgtgggttttaattttttttttttttttttttattattttattttttacaaggggggcagaaaggactttgtaaccggggtatgtacaggtaatttccatcatcctagaaggaggaaaaaaggccccaaaaacaagggtcaaaaattaaccgaccaaaaagaccccgtaaaaaaaattggccccccccaaaaaaatgggaaaaccagttttttcatt

SEQ ID NO: 40620 - DNA, 122 bp, Oryza sativa
  Clone ID: uC-osroM202029h02b1
tttagttttgcgtttttacatgtccgatgttttactctctttttgggggaatgcatgatagctgtaagttattcgttctgttgttttacgtgctttcgttatgtggaacttgtcaatcaagg

SEQ ID NO: 40621 - DNA, 238 bp, Oryza sativa
  Clone ID: uC-osroM202029h03a1
tttttgtttttttgaatttgttgtgtttcacataacatttttgcaatattcattgtttaaatcataacaaggggcccatgatccaatacttggccggaaatagaaccatccaaacgcatcacaatccaagggtgacaaccggctcttaactattggaaaacaaagggcatcaaaccagttcgagctagcaaaaactttttttactcccgcttgctaaggctatacagtttttacaggg

SEQ ID NO: 40622 - DNA, 480 bp, Oryza sativa
  Clone ID: uC-osroM202029h04a1
ttttgtttttttgattttttttgttttttttttttttttttttttttttttttttttttttttttttttttacccccccccaaaaacaaaatactggttattattcccggacaaggaaaggcccaaacaaaaaaatcctcccccctggattcagaaaaaaaagaaagaaagaaaagggggaaataccttttttttccccaccaatcctggggggtttggacaggccccccccccataacaaacctgggggggggataaccgcggtaacggccatgggggagccccccaaaggtaaaacatttttggcggggctccactgggggcacgttcgggcccggaaacccttccaggggggtctttattatatttacaaagggggcaaccatttcaagggatgggttcaacccggggggggggaaggtttttgaggaacgaacaggttcgggaacctcaaaaaacctcagggaagggcccccgggg

SEQ ID NO: 40623 - DNA, 485 bp, Oryza sativa
  Clone ID: uC-osroM202029h05a1
ttttgtttttttttttttttgggtcattttttccagtatcttctaaacaaagatgcaaacttaccacggttcactgatttatttcactacaggctacaggtacagaaaatttacgcgcatgtcacagattgcacacaatcggaagcaaaaacagcatatgacgaaacatagggacaagctagttagcttcacatttcacattgatcacagcgtcatttggcctggctactttcttctccctcggaatccatcaacttccaggggccatgggcgcccctaaccatgcccttgtccctttgcacgctccacgacggggggacgtggtactcctccttgagcgcgtccacattcttgttcaccagcgccacgtcccggtcgacctccagcttgaacccgccgggcttgccctgcgccccggcgacgccgtgcatgtagcactcgaggctgtgccacaccgcctggttccccggcgacttgaggtacgg

SEQ ID NO: 40624 - DNA, 478 bp, Oryza sativa
  Clone ID: uC-osroM202029h07a1
cagcgcgcacgtgcgcttgtcctctattgcgcgcgcgccctttttttttgggttttttttatgttcgaggggatcaaaagctatattgaaaatgttcatcatgtcatttataacaaggggggcagaaaggactttgcagccgggatatgtacaggtaatttccatcatcagagatggagtaaaaaagttgttagtagcaatgtctcaagagttaacggaccaaaatgaccctgtaatcagattggccaatccaagatcattccgagaaccagttttttcatttgaaaagaacaactcttcacagatggagccgctacaccaacaatctaccactaaatgagctagtctactgaggatttaatcacaggtaccgttccgtttctttgctgatgggccttcttattacctggggtttttgaatgccgaacaacatctttgctgcatctgcttcttgccatttcgtttttactgcagatac

SEQ ID NO: 40625 - DNA, 454 bp, Oryza sativa
  Clone ID: uC-osroM202029h08a1
tgttgttttttgagtttcgggggatcaaaagctatattgaaaatgttcatcatgtcatttataacaaggggggcagaaaggactttgcagccgggatatgtacaggtaatttccatcatcagagatggagtaaaaaagttgttagtagcaatgtctcaagagttaacggaccaaaatgaccctgtaatcagattgtccaatccaagatcattccgagaaccagttttttcatttgaaaagaacaactcttcacagatggagccgctacaccaacaatctaccactaaatgagctagtctactgaggatttaatcacaggtaccgttccgtttctttgctgatgggccttcttattacctggggtttttgaatgccgaacagcatctttgctgcatctgcttcttgccatttcgttttttactgcagatacttgaacctctgctttctgagattt

SEQ ID NO: 40626 - DNA, 444 bp, Oryza sativa
  Clone ID: uC-osroM202029h08b1
cccgggtgggaccgcacgcaggccgactggttcagatcgcgagcgcccgccaccgcgcgggggagatccctccctccccccgcctcctgtcccgcgctcgccgcgtgcccctgcccggccgctccgagcctctggtcccctccctctctacccgcgtgaatatttagcacgtgacgcggcggggggcgcgcgcgcgggcggcgggaggaggcgccgacgggggaaatcgggcgcgagggcggcggcggcggcggacgcaggattgatccagagattttttttttttggatatctgtgtggattggatcggaaaatttttttgagggcgacgcgtactcttcgaaattcgttttttccagattgctactacaacatggcttgcatgtctggacattttcaaatggcttctgtgctgaaacttgttatgaaggaaagtcatgcaac

SEQ ID NO: 40627 - DNA, 363 bp, Oryza sativa
  Clone ID: uC-osroM202029h09a1
tgtgttttttggaaaacaggggggtattacttttttttttgctgttttttttttttttctttgtatattttttttgtttattgagagttggttgctggcctggcccaacaaactgaggacagaacccaaagggtgctgaaaaaccccccccttttgggggaaaaagagggggccatagccgccggcggatggccttgttggctgcacggtccggccgggggggaagggttcgtttttaccacctccctggttttctggggggcccccggcaaaaaggggggggggggcaccgagaccgtgttcagcggggtcaagaccttcttgggggtggccgccggttgcggacgggacggctatgacagg

SEQ ID NO: 40628 - DNA, 453 bp, Oryza sativa
  Clone ID: uC-osroM202029h09b1
gtatttttttgattgatttttgcaggaagacgtcgacggagaagaagaggcatcagattagggtgagctcgacgggaggggtggagaatccaccggcagatgatggccatagctggagaaagtatgggcagaaagagattcttggagccaagcacccaaggctggcatttttctgatttccctctactttttccccccaatatttcagtacaaaaaaggtgtttgtttacacctttttcatagcctaatctgcacatgcgtatttcataagctttgtgctgtggcatcatcaaagatatatctgctatgctttcctgcttggtttggttgcttgtggctgccttatctttatcatggagaaagcagctgcagcctttcctctgatctcaaatgctaggactccacctgtcagaaattcagataggatcataggaccacctgtttgtttgcatg

SEQ ID NO: 40629 - DNA, 479 bp, Oryza sativa
  Clone ID: uC-osroM202029h10a1
tttgttttgaacaggaaatgcggaatggtccatatattgcgaggccgaatttataccggaaaggcacacggacgttacatggacaagtcgtcagagtctcacacaaacaagttcaagaacggatcatacggatgctgccatgagggtgcacggcggcgatcaggcgggcggcgcgtcggcgtcgtcgatgttgctgccggcgacgtcgacgacgaagcggtagcggacgtcgttgcgctcgaggcgctcgagggcctggttgacgtagtccatcttgacgacctcgatctgggaggtgagccccttgtcgacgcagaagttgagcacctcctccgtctcggccatgctcccgatgaagctgccggtgatggccttccggccgagcatcaccatgggcgagatgaagctcagcggctggttgatcacccccatcaggatcagcttcccgtccagcttcagcagcgccaggtacggctcca

SEQ ID NO: 40630 - DNA, 484 bp, Oryza sativa
  Clone ID: uC-osroM202029h11a1
ttggttttttgattttcagtgcaagttcaaatccttaatcaaattctgatattctctacaaatctgttatccttggaccaaattattttctctttcccaggccaaagagctcatatttgttatccttggaacaaagcaacacggtggcaatgcgccatctagtctcatccgatataaatatggagaaagcaaaaaaaaaaagaaaagaaaagaaaagaaacgaaaagaaggaagtaagccaggagtgaattttattcatcattccctgtgtattacactatacagtagtgcttcaagatacatgcacatatatggacagcattctggtattcgcatatcacatctcgtgtatttcttgggtttctgtcgctaaccttgtgttgctgcttcacatctctgccacgagtttggactgggcaagcgcaagatcgaatgaggagaaagagtgaggagcaagcgtgacttgcatctgctctgctgcatt

SEQ ID NO: 40631 - DNA, 276 bp, Oryza sativa
  Clone ID: uC-osroM202030a01a1
aggggggaaccagttttattttattctactttctactatctaaactaaactggtttttctgatttttggtttttttttactgcaacaattataagggtaatgataatgattatgagcccaaccactattactatgactattattgcccacactgggaagccagagttattattatttcctccattcaggccagcattatcagaaggggacccaggtgtaattggatcaggggcaaccccagatggattatttggtgggggaattgggggtttttcc

SEQ ID NO: 40632 - DNA, 423 bp, Oryza sativa
  Clone ID: uC-osroM202030a01b1
atttgttgtcatcttcttgtttatcatttccttacattttattggtgcaaccgttataggtcctgctgatgttgctgcctttattgccccaatgaacaccgaaagagctatctatggactatctagtttcacagttgatccatatttagttacgcttgcccaaaatttcacagaaacgtgtgtattacaaaacctggataccaatggttatcgtactattctacaaactgcatatgctgggctaaaaggacaaacctatactggttctgtagaacagagtattggggctacttacggttatgcgttaatgactgactatcttgttcctttaatgtggttggctcaaaaagttaattggacttgtattaataatacctgtgtagaacttgggaaatgtattgcctatactcagtctatatggca

SEQ ID NO: 40633 - DNA, 495 bp, Oryza sativa
  Clone ID: uC-osroM202030a02a1
agctcgctgtgaaaatcatctaactgatttacaagtgtgcacatggccgaagagttcagcagcagcaatgcattccaagccaggtactttcaagttttccagtaattacagaatgcgatacatccaaagatgtgagaatcaccagcatgaaaaatagcaataccagcgacaaaactattaaagcaatttttagattgttccattcagcatatgctagtaaggcctcaagccacccaggcggctttgttatttggcttctgataatcagatcaccgttggttctccctcctccgggcgtatcgggtcctgtcattgtacctaggcctatctgatgctctttgtgggacaggttctacccgcctctgcctctccggggacctctgaacaatctctccattgacgaagagctcagctccatagtccttgtactcagggtcgacataggaatcagggaggacaaacagaacaccaggaagcccttccagcttgttgacg

SEQ ID NO: 40634 - DNA, 300 bp, Oryza sativa
  Clone ID: uC-osroM202030a03a1
ggaaaaaaacgaaaaggaaatattttccgtttttattttttgggagggggggccacttttaagaaaacggggcacccaaaaagggaagggtttattccccaaaggggaaaaaaaaaatggggccacaacggaaatgaaaaaatcggggggggattttaaccccccaaaaccaaaaagggccaagggggggccaaaaggggggggggccctaacccccaaaaaatgaaaggggggggcccgtttttatcagtttcagggcccccctgcccatttggaccggcggggccttaaatgaaaagg

SEQ ID NO: 40635 - DNA, 344 bp, Oryza sativa
  Clone ID: uC-osroM202030a04a1
acacatatggggaaattgcatttcaccattatattgacctatataatccttactgagtccaaaaaagacttgccatacacacggtgatacgctgatcctgagagaaaaagaaatgcgtgcacaacttcccagagtatacaagcgcgggagcctgaaccgccaagcctgaggcgcccaatgagagagctagcacacagtaagagcgtggtacagactgccctgggtaacccacagaaaaccggacaggccagagggattaacggatcagacaaccgcgagtgcgaggctggccgcgcaaagcacgtaagcctggaaacttccttatattagtgagacaaaccaac

SEQ ID NO: 40636 - DNA, 281 bp, Oryza sativa
  Clone ID: uC-osroM202030a04b1
acttatgctgtttttgttcaccaatgttgtgctgtataatcttttgatttttagcccaaaggcttctgttatatatattgcgtccagcagctcaccaataattataagatgttggtactacagcggatttggaaggcacagcttgcaattgtaaggagaggtcaggagcacggtgatcaactcagaacgcggaaaggagtaatcgaggagatgcacgctgagattggagaggacatgctcacgaagatattggtgaggctgacgaacaatacgatgacgag

SEQ ID NO: 40637 - DNA, 428 bp, Oryza sativa
  Clone ID: uC-osroM202030a05a1
ggaaagtaaacctgaccatttcaataagcagttaagtacacaccatgcctgtcaatgactgcccacaagagctattaattaagactatcgctgaagaaataatcggaggtagaactgggggtgtgtgtcggcactgatccccaccttcccatacatgacgctgaacgtagctggaatcggacgtgctcggacgctgtttctgctgctgcttgcatcccacaaatccctgaaaaggccgtccagctccaccggcaacacgaccgtgtgtactgttctagcaccgccagcccagagataccggtgactcctccatggccgagctcaaacaaggagggaatgcacaacatttattagcacaaacggtggaagaacagaaagaaactgccgtttacctctggcacacagacatggaaggatatgcgggcgtt

SEQ ID NO: 40638 - DNA, 466 bp, Oryza sativa
  Clone ID: uC-osroM202030a06a1
gattagggatcacttattcattatagttcttccatgctgctctaccacagcaaaacgcttcagacaccatcaaaccagacttaaggatacacattacaggtaaatagtacacaatgaaacgggacacgaccaaggaccagaccagacaaccatagctccattggggaagacaaataggcagacttgtgaaccctacaacagcagcagctccatggctgaggacttactggccaccacggaggcggagcaccaggtggagtgtggactccttctggatgttgtaatccgcaagggtgcggccatcctcaagctgcttaccagcaaagatcagacgctgctggtccggggggatgccctccttgacctggatcttcgccttcacgttgtcaatagaggcggacgactcaacctcaagggtaatggtcttgccagtcagggtcttcacgaagatctgcatcccacccct

SEQ ID NO: 40639 - DNA, 558 bp, Oryza sativa
  Clone ID: uC-osroM202030a07a1
gtgggcatcttatacttgtatggagtatatcagtatatgctagttgcagacgttttacagtgcaactgtaactgttgctacaatgttactgaaagagaaacagaagaaaacaaaaacaacagtctgtatattccagtttgtattgctttcaatgctgtctgatgtacaaccgcattgtgatcgacagtgaagcaacaagttgcaaaactatttccagtgaaacacaaatctatggtatataatgagttgattttctatcaatcatgcatacaatcctccacacgaaatcaacaacaggcccaactgactgttaaaaataggatctcgatgaacgtgatgaacgagtggtgctgccctcatttcgatctttcttccacatgccctcaaagctcaggaagcatttgagaggtttcaccttccaacggtttctctgagatatttcattctggatataagacaattgttcaatgatcgttctaaagtcaggcctgctagcaggattttcactccagcattgttcaatcagttttttaatccgtaagcataatgctttgagga

SEQ ID NO: 40640 - DNA, 523 bp, Oryza sativa
  Clone ID: uC-osroM202030a08a1
aatattaatctgttcatgatcaaaatgactcaacaatgactacaaatatctacattggtatacattaggttagcattcttctgggttgcaaaagtttctttcgtcctctgctgtcattacccataacactgaatctggatcaatagctgttatgtcttctatttctgcttcagtagaaacctcacgtatacaaataggagcaatgcctagtttatctccagagatttggattaaatcatgtaatgtcgagggtaatctgatttttttgcctcctcgtcgtccgtaacgtctaataatcacccatgggcgagtagaatcacttgtgatagatacactttttgtaacatgcgcatgtactctttttccagtagtaggaatagagaacagagatttactatagtgtcgggatataaaggggcgatgctctggctcaggaagttgtagaggaggtaaatcaattaaagctttttcaatacacatggcattttcttgatcattgtttgaatctgaatcactcagaaaa

SEQ ID NO: 40641 - DNA, 526 bp, Oryza sativa
  Clone ID: uC-osroM202030a09a1
aatgaaccatccactggaattgtagggataatatatgaacatgtcccattggggcattcaacaatcggcaatgttcgacaagactaaccagaatattcaacaaaagtaacaacactgaaaccatcagatggtagcaattgtacacttgtatgagactctgtttctgctagcagaggaattttacaacgatgcaggagatgtcgactttgcttttccggttcacggcctgctccgtcagatgcttcgcagctgcctgagcatccttgaagtccttgatttcatccaccgcctcttggttggacatcaccttccataatccatcacttgcaagaattagaaaatcagtattctcgtctataggttcctccaccacatctggctctgagctgaggtgcttctttaggctccggtctccaaatgcccttgcaaccgcaagctgaccatcaacacgcggtacatctcctggtaagtttgaaacaagccaccttttttctcgattgaatgccgctccttgttggttcatgat

SEQ ID NO: 40642 - DNA, 521 bp, Oryza sativa
  Clone ID: uC-osroM202030a10a1
aggtaaaaggtttaattaacataggagtacagcagaaaataacaataaaaagatagcatggaattaaagccgctgctccaatttaccatacgcagcatttgattacaggaataccaaaaaactactaccgatgacaggtattaattattaaaaagcacaggttcagattattgcgacaaaagtttttgatacccgtaagattggacgcttgatagccaaaccacactcagaaccctaaatatgcatacggaggatgtccaatcggatcttcagccaccaccagaggcagatcagtacttgtagtccttgacgtgaaggctctcagaggcaccctcgccgagcacagcatcaccctggtatgtaccaagggtagcctcagagttggccttgcacctggtgatgaaggccttctgcgccttcaccacgttctacgtcttgccgcccaggccttgagcgtgctctgctggagagcacggccgaaggagaaggacagagcccacggcttttttgtgctgagcttg

SEQ ID NO: 40643 - DNA, 434 bp, Oryza sativa
  Clone ID: uC-osroM202030a10b1
tcgcttctttgcgtcctctcgattcctcagcaaccatgtcggcctactgcggcaagtacaaggacgagctcatcaagaacgctgcctacattggcactcctggcaagggtatccttgctgcagatgagtccactggcaccattggcaagcgctttgccagcatcaatgtcgagaacgttgaggagaaccgccgctctctccgcgagctgctcttcaccacccctggtgccctccagcacctaagtggtgtgatcctcttcgaggagaccctgtaccagaagaccaaggacggcaagcccttcgtcgatgtcctcaaggagggtggtgtcctccctggcatcaaggttgacaagggtaccgttgaggttgccggcaccaacaaagagaccaccacccagggccacgatgatcttggcaagcgttgcgccaagtac

SEQ ID NO: 40644 - DNA, 454 bp, Oryza sativa
  Clone ID: uC-osroM202030a11a1
gatccttggacaatgcttacatgatttactcaatggaatggaatcgaatcgaatctatatatacatattcaagcagtgccaagcactgttgaatgaaaaagacctaggtacctgacttattactaccaggccttagctgagctagaaagctgggaaagaatgggcgatacatcttacactgttacatctcgctcagcagattgctgatcttgcgaagctccgtcagagcagccattgcagtgacctgtcctttgcctccaagaatgttgtttgagaagttctccacagggccaggctgaccacggtcttgctgaaatgccgactcaatcacctggatatttccaagcatgccctgtccaagaccctgtagggtgcccatgacctttttatcaccagaagccaactttaccctaccacgggagttatttgaattcccgtcataaggagaacagga

SEQ ID NO: 40645 - DNA, 313 bp, Oryza sativa
  Clone ID: uC-osroM202030a11b1
tcgattcatctttatcccgaaaagatcctccttttcttggggtttctgacaggcgtgcacggctatctttaggcgttctcggtctcatctctcgtggaaaggttcttgttcttcggggttgtttgctgctgcttaatttgaggaggaaaagcccaattcttgtggggagcgaaggcagggaggagggccgcctgtctcttcgagtgctgctattgaccacccctggtgccctacagcacctaattggtgtgaccctctttgaggagacccttgaccagaagaccaaggtcggcaagtccttagaagctgtcct

SEQ ID NO: 40646 - DNA, 389 bp, Oryza sativa
  Clone ID: uC-osroM202030a12a1
ggcgcgttcgagtccatgggcgccggcctcgccatggcccccggcgacatcgccttcaagtcaaactttgctacgttggatgaaagcacggggatcattgtcagcagaagggcggatcgacactttgaggaggaaggcccgatactctgtgctgcattggatgggttgaagctcccatcgtttcctgaatatgaagtgagagtcagatatgctactgaacacaggtgtggtgtggttgtgaaaggaccgaggctgagtgggaacatttctggaactgatccattgaaggacaaccgcttgcatctaaaggctgaacctttggatgattcagaagaagctaaaaacacggcagctgtggtcaatgagcttttctaggagattacacgtat

SEQ ID NO: 40647 - DNA, 426 bp, Oryza sativa
  Clone ID: uC-osroM202030a12b1
gcttttgcttttgtttatttatgctattcagtgcaagactcaagatccatgagaagccttattcatcttagactgagctggctctctgaatacatccttgtttgcaattattacagacatggaagcctcaaggtcaacagattacacaaacgtcagtatgttgaactggcactaatcgttcttcgctttgatgaacttcttgatgatgcccatcatctcacttccagggaaacgtccaaggcagccccttgcagcggcaatctcgttgaattcaaagacagaatcgccactgaaagctttgcgctgatcagacttgcgatcagctacatctatgttttttgccacatcttcttcagatttaactgaaggaagcaggaaatcgtccagggggaaagttgattacattgtccttccccatagctacta

SEQ ID NO: 40648 - DNA, 415 bp, Oryza sativa
  Clone ID: uC-osroM202030b01a1
agagacaaaatctggatctctctattatgttaatcacaagggctccatgtccaagtatataaatctacaatacatacaagggggggggtatatactagtataatgcaagtatccgctacacatatgtactacgccaaaacgaatcaaggtatcaaaagaaggggagggagtaggtacacacacccacgtcagtcgggatcctcacgccgtcgccggcggggtgccgggcactggacgcccttctcactaattttttagcttaagcctaattaaccacgaacgagccaaccagatgcgagcttgggccaggtcaaccgacgacgacgtttttgacggcgacggggggggcaaccaccgtgcgccggcacagggggcacgacgcgtgcctgagcagccagctgtcgatgcaacggag

SEQ ID NO: 40649 - DNA, 432 bp, Oryza sativa
  Clone ID: uC-osroM202030b02a1
ggaaaccaataaccctttttgcctggaaaacgttttgaaaaaaaaaaatttttcctatggggattccccaaagcgcaaggggggcccaggggcaaattaattagtaaaagacccccaagggcaatgcccttttggcaaaaaagggttctccccttaaaaaacgggcagaaacattggttcctataaaaaaaaaatccgggcgcccccaattttgaaaccccttgggggttttgaaaaacgggaccccccagggtaaaaccccttttggggggtaaaaaacccggactggggccaccccctgcctttggggccgggaaccccctgctcctgaaaccttgggggcagcaggcacctttaaaaatttttggtttttggtgggaaacccccccccttggggaagggagggaaattttggtcccgccccaattttcc

SEQ ID NO: 40650 - DNA, 473 bp, Oryza sativa
  Clone ID: uC-osroM202030b03a1
gtaatccatagttccgtaccacgagggtaaaattttataaccaaatgcatttacattttcaagaattatcccagtacagaaatgttacagcaggcttaatttattagaatgccaacagaaccacgtttccttgggctgctttgacccaaattacaagcatttattaagcaaggtgagagtgtggtaacagaggcatgttgtttatttgctcatgtgcttcttgaaccaaacacctatattgaggaagctttcaaaatcagactgtggcttgtcaaggccatgcatatcttctggaaagacaataattttggtttcaactcccatctccttcaaggtccttgcatactgtaagccattagaaacaggaactctgagatcttgtgctccaaggagaaaaagtgttggcgtgctcacctttgatatatgtgatattggtgatttctggtgaaattgacaaagatcatcaaatgaag

SEQ ID NO: 40651 - DNA, 460 bp, Oryza sativa
  Clone ID: uC-osroM202030b04a1
aaaatcagagaagaacttgaccaaaatagctctttggagaggagaagtaaatttacaggaattcattgactgcacattcaaaatcagatggaatcacaaaaggagggagaaatctggcacattccaaaattacaaaaattgccattcatcctcagtctcattgcctactctgttctaaattcaccaatactctgttctcttttttcccccaatttctggagaatcaaaatttgtccacacttttcagtgcgagattttgattagtagctccagagcggcatgtcggagccggcgagctcgccgtcctcccaccacgctccgggggccggcggctcgacgagcagcccctgcgccaagctcgcgtagtacgacccggcgtccatcccgccgaacctgaacccgtcgtcgagcttgaacgcccccgcgttgaacaccttcgacgtcggcaccggtaacacgt

SEQ ID NO: 40652 - DNA, 354 bp, Oryza sativa
  Clone ID: uC-osroM202030b04b1
tttaatgtttcgccggcgaagtgaaccagagagagtcatccatggaggtggaggaggcggtgtacaggacggtgtggtcggagccgccgaagaggccggcgggaaggaccaagttcagggagacgaggcacccggtgtaccgcggtgtgcggcggcgcggggggcggccgggcgcggcggggaggtgggtgtgcgaggtgcgggtgcccggggcgcgcggctccaggctgtggctcggcacgttcgccaccgtcgaggctgtggctcgcgcgcacgacgcctccgcgctggcgcttcgcggcatggcctgttgcctcaacttcgtctactccgcgtggaggattgccgtccgtt

SEQ ID NO: 40653 - DNA, 425 bp, Oryza sativa
  Clone ID: uC-osroM202030b05a1
agaataaccaaaacataggaggtttcatttcttcttctcaaagtagtgtagcatctttccttctttcaccattacataagcttaagcaataacagataacaaatcctcctcctcctctaggtaaaatattcaaacacaatacccttataagtacttattattaggaaagtagcgtgcatgggcataaatggcagcggggggcaggttaagaatcacaatgctgagcagcgaggaaacaaaacaccataatgggacagagcaaaagcctccgaaagggagcttttaggcagaaggcttctcccacttgaggggcttcaccacctcccaggtgaagtctgggtcgtcccttccgaagtgaccgtaagccgccgtcttgaggtagcgtccgttgccgcctttcttgaggtcaaggttgatgatgatca

SEQ ID NO: 40654 - DNA, 497 bp, Oryza sativa
  Clone ID: uC-osroM202030b06a1
gaaacaaaatcatttttttgaaagattatgcgcatgtcatcatgacagtacaatcttgttacataatctttcaaaaaattacaacgtcaaaagaaatctttcagaaaaagcttcaaaacagcagcatgcactgacgggtcccaaacagctaagctggtcgtcatttccacggttgtaaagccattttcacctcattgcagttgtgcatttggtcaagcggcgcatgtcttgtggcctgcagattctctcctgacatcaaccaatgggtggagtacaggtcctctctcctctgcatttccaaagggaggttatcccttattgtttggatcatagaatggtcgatttcacctacgacagttgcttcctcgtgccctgctgttgcaatgacttccccaaatggtccaataagacttgaatggccccagatcatgtagtccgattctgcattagggtctctagctggcgagcaggtcaccacaaacaactgattgtcaaca

SEQ ID NO: 40655 - DNA, 443 bp, Oryza sativa
  Clone ID: uC-osroM202030b06b1
tttatattggccgctgtctcaatccctcctccccaacccaacgccaccaagtacaaggtcgcgctgctgcagctgccggtgtcgccgcgcaaggaggagaacatcgtccgcgcgcgcgcccgcctcgacgccgtcgccgtcgccggcgccacgctcgtcgtcctcccggagatatggaactgcccgtactcgatggagacgctgccgagccacggcgaggacatcgacggcggcgcgttgccgtcggtctcgatgctgtcggaggtcgccgcccggaggaggatcaccatcgtgggcgggtcgatcccggagagatcatccgggcggctgttcaacacttgctgcgtgatcgggccggatggacagataaaagccaagcacaggaaactgcatttgttcgagattgatatcccaggagacatcactttcagagaatctgacac

SEQ ID NO: 40656 - DNA, 355 bp, Oryza sativa
  Clone ID: uC-osroM202030b07a1
gggggaaaaagggaacccaaaacccctttttaaaccaccccacttaaaaagggggttcagggggggccacaatggagttgggcaaaaacaccccccgggaaaatggaaaccttctggggggggccaaaggcccaacaaaatttaatacaagggggccccaaaaggggaggccggggggtaaaactgggcccagcctaaaaggaaaaaaaggggtccccgggcaatggaccaacagtggtaaactaaaaaccctttaaggatcaaggaaccccagatttgaaagggtggggggggccccctcgtgggttccaaaaaaaggccttttcaactgggaaaaatattctaccaggggggg

SEQ ID NO: 40657 - DNA, 547 bp, Oryza sativa
  Clone ID: uC-osroM202030b08a1
actcaataaactttatttcttgaaactcgattttcatttttcaaagttggatgacatttgtcctcctaccattatcaacgtacgttgtcctaagttaaccccaacaattacaatccgtcaattcgttctaattaacttgcctcgataaaacacgttagctaggatcgatgaaacagatcatagaagaaatcaattcacaggcgtatttgcttgcaatatttgggcgttcttaattgtgttttgctttcgaaaccaacaaacgaaaaatatatttacgtacagacaaccgcaacatcagatcgccgccgccgccgccgccgcggcgaactcgatcgatcacatacacggcgtcgtcctcgtcgtcgccggccggccgtcacgcgtaggcggccggcgcgaggcgcggcgtgacgagggcgcggagcgggacggccttgggcagcgcgaggccgaacgtctccgacatgtccaccttgtcctcgcccgcggggagccgccagtcgaacgagtgcagcacgtgcccaggaagtactggacgaacaccatg

SEQ ID NO: 40658 - DNA, 486 bp, Oryza sativa
  Clone ID: uC-osroM202030b09a1
aacaacaacaaactgtaccatatgaacatatatccacagccattaatttgtattacaattggagagggtgcatatatatgtctatcttcatcacacctcaagccgaaaatttgtaaacaaaagaaaaaaaaagatatggataatatacacaagctccttatgatcatgaccaacaaacatatgaatataattacacatgtttaatcacccccaaaaaacaagaaaccccacataaattaatttacaaccgatgaggcgaccatatatatatataggagagagatgaaaggatcaaagggtgaaagaattcaataacaaatgttcttgcatgccaagtgtgtgtatcttgatttttacttactttttgtgcagagactgagagagagtagtgtgatcacattaaccttaatcttgattttaattaccatcagctaagcttagctaagctagcttagctttgcttgcttctggagtgatcactactgt

SEQ ID NO: 40659 - DNA, 514 bp, Oryza sativa
  Clone ID: uC-osroM202030b10a1
tttttgttttaacaacaacaaactgtaccatatgaacatatatccacagccattaatttgtattacaattggagagggtgcatatatatgtctatcttcatcacacctcaagccgaaaatttgtaaacaaaagaaaaaaaaagatatggataatatacacaagctccttatgatcatgaccaacaaacatatgaatataattacacatgtttaatcacccccaaaaaacaagaaaccccacataaattaatttacaaccgatgaggcgaccatatatatatataggagagagatgaaaggatcaaagggtgaaagaattcaataacaaatgttcttgcatgccaagtgtgtgtatcttgatttttacttactttttgtgcagagactgagagagagtagtgtgatcacattaaccttaatcttgattttaattaccatcagctaagcttagctaagctagcttagctttgcttgcttttggagtgatcactactgcttctccggctcagccgcc

SEQ ID NO: 40660 - DNA, 476 bp, Oryza sativa
  Clone ID: uC-osroM202030b11a1
caaattgaactgtatatattttattatttatacattaaaatgaaaaaaaatgaactgtacaatttcagtacaagagagaccaccaattcatcatcactactactttgggtatacatctacattttaggcagtcctaacatgctgcttgatcaatatcatgaatttgtaaagaatgtgctgtatttaagttcaggtagtttaacatgctccaatgatcacttttttttccctgaaggtaactacagcttgattgcaaaataaaacctttttccagttacagcaccaaggggggtagcaaccaaataaacccaaatctgggtgaatctccctgttgcaatggccgggccaagtgttcttgctggattcattgatgctcctgtcgatggccctgcgacaagagcgttcatcatgattgttgctccgactgccactgctatcagctttttaactgcattggggtcagtggcaagagcagt

SEQ ID NO: 40661 - DNA, 422 bp, Oryza sativa
  Clone ID: uC-osroM202030b12a1
gagtaactaaaactgaagaacatcctaaatctgactaagcaaaatttataaggatcgggcgagctacaatactgcattgtttgggatttgggcacctgagcaacaatactggttatatatactctgacgccctggtgccaactcaagtatagggtttcagaaacagagtgtagaatcctcaacgaattttaagattacttaagcatacggggatatcctctacattttcttctgaatccccggggaaaccaccaatgccagttgaagttgaagggctttcatttttcatcccacttcgggatggcacttgaacccaaaccccactatttctgactttgaaggggggactctttctatctttaactttattgggctcaattttgggcttagcaagcacacgggagatatccttatcactgttt

SEQ ID NO: 40662 - DNA, 501 bp, Oryza sativa
  Clone ID: uC-osroM202030c01a1
gacaaaagggggaccacgaagatttcttcagtcttaaaaaggttcagtagacgactatattctgtgaatctctgatccttcacaggagtgctactagatgcttagaccagtacaaagaggactttgctcgtgctgctcttcactaaacatttcgtagatgattacatggtctcatgatctcatctatatgctagttttcgaatggacttcattaaaacgattacgattacatgctagttttgtgaagcattcaggtcgcttcaagaataatagcactattgatagaggtaagcaattctgaaagtctgcctgtctgttagactactgaactaggtcacgtcatccttctttcgcacctgatttcaatgccaccagcaaccacgtcctaagctatgcatgtcttgtactttttggtaccatatcctatgattgctctttgtaagtgagacaccatcaaaattattggtgttaacatggatgattctttcctgaggagttcat

SEQ ID NO: 40663 - DNA, 401 bp, Oryza sativa
  Clone ID: uC-osroM202030c03a1
ggagaaagtcaaggttcgataaatattgcttcacttgtacaaagtacagataaaaatacattgatacatgacacggagagagccatgcacaccacttatttggacacacagagggcaaggctgcagagaaaatcaagcaacacaagctgaactcacggccccacctgtcagcctctcactggtcgaggccggagactcttgtgaaaaacagcaacaccacgcatgcagaagaagacaaattattacacacacaaatcgacgacacggcggccggcgacgtacggcgaggtcgtcgccgccgccggcgacgttgtgatgaggtcgatcagccgaagaggtggtgcttcttctcgccggtggactcctcggcgctcttgtggaccttcttcttctcgtggtgc

SEQ ID NO: 40664 - DNA, 153 bp, Oryza sativa
  Clone ID: uC-osroM202030c03b1
cgtactcttgggacttgcacgcgatctacttactgggactttcatcttacgatgctaaaggtaatcactagctaatagctcgcttaagttacgaactagccatgagcagacgagaagcaacagctctacgatttccaccacaagaagcgacca

SEQ ID NO: 40665 - DNA, 393 bp, Oryza sativa
  Clone ID: uC-osroM202030c04a1
gaaaggaaattaaactgatttattacttgttccattaaaaccatcacactcgggtacgtggtgaaaccgtgaaagttaaaaaacaaaaacagtagtagtagagtgaggccctgctcgctgttacatgagaggtgcacgaagaaccagcacacgagcagagcatccagcccacacgcagcaaggaaacggtagggatgccgccgccgccgccggccgatccgccgcccggcgatgatgcgtcgtcgtcgtcgttcaggtgcacgcggaggcggagcggcgtgcggcgcggcgcggtcgagaggtgatgagtagttgacgcggagcagatatatatggatggatggcgtttttctcggtcggacgaccggtaggttgtgcgcattacgcgcgggc

SEQ ID NO: 40666 - DNA, 320 bp, Oryza sativa
  Clone ID: uC-osroM202030c04b1
ccaagtcgcgtcgcaccgaagcagagtagagaaggagaggagcggagcgccatcagccgtccgatcgagtgatccgatggctctcgctctctccacctctgctgctgctgccgctgccgccgcggcgcgggcgctcgcggcgagggtgacgacgacgaggggttacgccgcgtcggcggcgtcgtcggcgatgaggcgggcggcggcggcggtggaagggaagggcgctgcggggatgacgcaggcgaaggacgggttcgtcgtcgtccctggcgagggaggtgttctgcgtgcccgaccccgtgactggccactaccgg

SEQ ID NO: 40667 - DNA, 400 bp, Oryza sativa
  Clone ID: uC-osroM202030c05b1
atcggtcgccctttttttttttttctactactaaaaattaaaaagaaataaatgaactagcggtcatcatgtaaaaactccggctgctagacctccatcggcggcggacagttcagatcaagatcaaaagcgatggctttcttcgccaacgcggcgggcggtgatggtgccagatccacgatcgacgaggagtcggagtcgctctgtgccaaggcggccacggtgaccggcgccggcgcaatcttgagcatgcggcaaccagaggcggcggcggcggcggccgcttgtccaaagaagtagtaagggtgcgatacggggtagccctcgaaagggaaacgcatgccgcctgcgccgggtggtgaggacgaatagctacctgagtaaacaaatcgtctacttg

SEQ ID NO: 40668 - DNA, 536 bp, Oryza sativa
  Clone ID: uC-osroM202030c06a1
acaagaatgtaagacattgtttatgttttagaagaacagtgcaagcatatacattatatatggaaagaataaataagatacataaataacaatggggatggtaaaaatgcacagaagaatgtggttggccgaaatggggtaaattttcacatcactcgcttatattcactcgccttcgcagagggcaaacaaatattgccttcttagctgtggctatcatgtgtcaattttggggatgttgaacttgcaggtaatattaaataattgaagtcatggtctagacctcgtattgtctcagtgaggactccagcagctgatggctggggcagatcatctccatcactcgtgtcccatccttgtaaattttgaaggttggaactgtcttgacattttctaattgtgtcactgtggggttctcagttatatccaccttgaggaaattaacagatggatatctggtacacagtgcatccacaaatggggcgatatcagagcatttgtgattaaaggtgccatgaaatgaacacagaaacacc

SEQ ID NO: 40669 - DNA, 435 bp, Oryza sativa
  Clone ID: uC-osroM202030c07a1
gtcaatccttcattaactgattaactctataataatttcgtttgccatgctgagcagatcaaacaacaacatccaaaccaaaaccaaaccaaaacagttgtttttcacctgtataatataattataaccataataattacaatcattccaagaatgacacccacatcgtcgacacctactcgacgaactgcttgccttcgaaggtctgcgcgaacatccagtccggcggcgcgacgctgtaggcgacgaccgtgcggcccctcccgccggtgacctcgaacgacagcggctggccgcggaggtcggcgtcgcactgccagttctggccccagttcctccccatcgggatccacccggtcctcgaccctttcaccttcaccgccgccacctccccgttcgccgccacgttcgtgatcagcacctgcaggaagctgg

SEQ ID NO: 40670 - DNA, 459 bp, Oryza sativa
  Clone ID: uC-osroM202030c08a1
ttttttttttttttttttttttttttttttcacataaacacatacttaatttattttgagaaggttgcaaagattacagtcctcaacaatatgccggtaaaaacagggatctggtgaaaaaacaaccatacaaggttgtcatgacagggttttagtatgcgccttgcaatggccagatcccccaacaccaggcattcccaagagtccctgtaacaaaaaatcaaccctttatgacctttacacactaccgaaaacatcatcacacatgacctcaagacaccaacagattcagtaaccatacacacagggtaagtctgcaggcactccagcgtcgccggcagcctggaacaccggcgctgccgactactggtgacaccggcagttgagctgcggaactccatgacagcccccctgtgccgatgccggtgcctgcaacttcatgactaggaagcaagctgt

SEQ ID NO: 40671 - DNA, 536 bp, Oryza sativa
  Clone ID: uC-osroM202030c09a1
tttttgttttttttttcaacaagctttgcaccagtcaattacagggtgcatatgcagctcattctcctgtacagcagcaatcagtacatggaacaaagcaaacaaacagtccatggaagatggaacaaagcgctgtacaacaaaatggcattcctattcctattgaaaagaagtgccaacgcttcagatcccagatttcaaacaacataacccaggaaaacaaaaattgctgggtggttgattccaaacagcaaagaaacaaccggaataacaaaaaggaaatactaaaaatgaatgaatgggttaagcaaaagaaataattgcatagcccagccagaatgacatatcaggaacaccagagacggtggtagtttcaaagtttacccactcgatcaactagtttggacctgactgactgactgactgaatgcaactcaagaaggactcaatgatagttcgacggacggacacaaaagggagcctgctactgctaacaattacaaggcagacgcaaaacctaacaagaaagaaactta

SEQ ID NO: 40672 - DNA, 424 bp, Oryza sativa
  Clone ID: uC-osroM202030c09b1
tcgctctacgaatccaatccgaattccccccccccccccatctcttctccccttctccaaaatcctaacccccactccccatcggagagagatcgagaggaggttgccatggcgaagtgctcctcctgcgacgactgggtcatgctggactccgacaaccccgcggactcctccgacgacgacgactacgtcctcgcgctctcttcctcctgcaacacccccgcctgctccgacgaagaggaggacgacgacaacaaggtggggagcgacgctgtcggtgacgacctttacgggggagaacttcaggaggaggactcgccgcgcccggcgccgtcgaggccgctcttgggcctcttttaccacaccggcttcgacaaccagtccgggtacctcgcattcgacgtgatccgtagggccaagcacc

SEQ ID NO: 40673 - DNA, 513 bp, Oryza sativa
  Clone ID: uC-osroM202030c10a1
atctcccgctcggtgcgccgcgcgctcgaccagccgctcaactacgcgcgcgtctacctcgccgacacgctccccgccggcgtgcgccgcgtcctctacctcgactccgacgtcgtcgtcgtcgacgacgtgcggaagctctggtcggtggacctcgccgggcacgtggtggcggcgccggagtactgccacgccaacttcaccaagtacttcaccgacgcgttctggtcggacggcgagctcagcggcgccgcgttccgacgcggccgccgccggccgccgtgctacttcaacaccggcgtgatggtgatggacatggggcggtggcgcgacggcgggtacacgcggcgggtggaggagtggatggcggtgcacaagcggaggcggatctaccacctcggctcgctgacgccggtcctgctggtgctcgccggcgacatcaaggcggcggatcaccggtggaaccagcacgggctcggcggcgacaccgtggcggggaaatgccggagcctg

SEQ ID NO: 40674 - DNA, 434 bp, Oryza sativa
  Clone ID: uC-osroM202030c10b1
tcgttcatcgtcaccatgatgaatcaaattcaacggtagaaaatttttcaaggaacccaaaacaagaggaagaaagaaaaagagatcggcacatgcatccacatatgtactactctgtaaaaaaaagtcaatcctagttataaacctagatacatatgtatttagattcgtaattaggattagtttttctacgagacggagcgccttccttccattgatcctcttggcatgtatttcttcaccacttccagtcctaattaatcttatttgtgccgttttgcatgacgtcacaactttttgtttgtttcattttttgccccttttgtgttttgcacgtatggacacatgcatgcatgcatgcacgcacgcacgtgcgtacgtacgtgtacacaccttctatccctatccctattccttttctattgtatgtctgc

SEQ ID NO: 40675 - DNA, 348 bp, Oryza sativa
  Clone ID: uC-osroM202030c11a1
aaaccaggaaaacaaacgggggcgccccaaaattcccttggggggccccaaaaaaaaccagaaccccttttttctacgggggggaaaaaaaaaaaaacccccacccaggaacagaccaaaaacccaggggggtttaaaaaaaaaaaaaaccccctttggggggggctcgagcccccaggggctcttccctattggggggggggaaaaaaaaacgccaaacaaaggggcattggccccaggcaatcgttaaaggggttcaggggcctttgaaggaaaatccccactttgccggaaactttaatttttggttgcgaggggatacaaagaaaaaggggggtccctcacagc

SEQ ID NO: 40676 - DNA, 485 bp, Oryza sativa
  Clone ID: uC-osroM202030c12a1
tttttgttttttttttttttttccttgttttctatttcatttcattccgatagatagcaacaagcagttcaaacaccataaccaaagcgaactcaattcatggtaacatcacggacgaagaacacctaacactggatggatggatagagggcttctcgactcgagagagccactggacacgataacgactcgactcgatgataagatgattctgacacggatagctaaggataactggccacgatgggccccaccaatcagttcctccagttcccgccggagtcgccgccgaagccgccgccacggctgccaccgaagccgccgccgccgccgccacggccgccgccgtagccgccgccgccaccgtagccgccctcacggcgcccgtagccgccgccgacaccttctccgtagccgccgtctacacgaccgacgccgaagccgttaccgacgtcgccgtagcccccgcctcagccgccggagcg

SEQ ID NO: 40677 - DNA, 488 bp, Oryza sativa
  Clone ID: uC-osroM202030d03a1
gcaccattggatacatttttttattaagctaatgttaccaaatgagccatggagtgaatgttctaggtattatggggacttgttaccatcgaaattacatatagaccacagcaagcatacagtcttagttacagggaatacacaggatgaatcaacacctgagtgtatgcaaatccttcaagatctttatatccatatatcagaggggcaatctccaccaggatatttcatttcatgggccaaggagggaccctttggctcagcaccaaaatttacaaagaagttagggttgatcgatagtcctcctttttcagggtcgacgtcgatctgcaacatgggggagccctttttgacaagatcttggccatagaactgctcgtcccatcggctgaaaagagagttggtcacatatatcctcttcccatccaggctcagctgaatcatttgtggcccaccttaagtcgatgacccttgacctggggcacact

SEQ ID NO: 40678 - DNA, 507 bp, Oryza sativa
  Clone ID: uC-osroM202030d04a1
gccgtcgaagttgctcgtgcccggcgggctcagggcgctccccatcccggtgccattggtgccggttccgatgccgcctccggggctcaaggtgccggtgccggtgccgactccagggctcaagccagttgtcccagcagcactgcatgaacaaaggtggaataaagagctttagatcatcatgctcctgcttcgagttacactgactgaagagaatgcagtcaacagtgcataattcagtcagaagactgctgatggcttgatttgttaacatgctaatcgagtgaaaattatgaattcggttgtccaagactggaaagggatcactttggaaagcctgtcatctcattattgtaagctgcaaagtgcatttctaatgcaaatcaggctcatcgttctgtcagttatgtccttcacacatgacgcacatgcgagaaaggctgtccaactttttgttaagtaagagttaagacggcagcaataatcagccttcatgaaaataatact

SEQ ID NO: 40679 - DNA, 340 bp, Oryza sativa
  Clone ID: uC-osroM202030d05a1
ccagcaaaagacagggtatataatccactagaagaattcgatcagtttttttttttcaataaaacaggaccaacaggaattcagtttcacccacagttacttaaagactacagagccgggggtggaaaaactgccatccttgggggttccacagggaaacgatgacttgtccaagccaaacagaaccagaagtgaagggaagggaagagaaaatttgcataaatgagaattcagacctcggccttgtgctcggggcgatgggtgaactcgaagtcgacgggcacaaaggcgcgctcgacttcggggggttgctccagcttctctgggagcgactccccga

SEQ ID NO: 40680 - DNA, 439 bp, Oryza sativa
  Clone ID: uC-osroM202030d06a1
aagatgacaaaaatatgcacataaactgcatatgaaaaccatgagggcactttatacaagccggacaaaagctaaaagaagtttacgatgcctaaaggctgaggcacacggaatctgaaaaccccgcagctagttaaaaacaacatacacagcctacatgagacataacttacttggggagataagagggcaactaccacctaggccacattatacgcaaaggtacctttttttcagcccacatgaacccggggtctaggaaatattcgaccttgtccttgcgctctgagatatggtcgaactttaaatctctctgtccaagaggagcttgaattgaagggcgtcgtgcgcggcgaagaatggcgcgaacaccagtgactcgacggccatgagcttgatgaggatgttcagggacgggccccacctgtactagagcggg

SEQ ID NO: 40681 - DNA, 552 bp, Oryza sativa
  Clone ID: uC-osroM202030d07a1
ggatgtgtacgcagctagctatagctagcagctgttacatatatatatttatatagtactgatcagagattgagatgcaactgcaagttgcgctatagaacgagttactaacatgtatatattaattcctccgtcgatccctatatgcaagctagtaattacagtaattagcagctgtagcaaggatgtaacaattgagatgagctgagtactcccacatgattaggaggcatcgatcgatcgagttgatgtagtcgtcatcgtcttggcggctgatggatgatatatactatccccagagaggtagcgaataatccgagcagaagaaggcgtcatcgatatcccagagcggcgaggcgggcatcggcggcggagcgacgacgttggtgctgctgctccagcagtcgacgtcgacgatgatgtcgtcgttccagagaggatgaaggaacagctggtgctggtcctcatgatgttgggcctgcaggctgccactggccgacgactcatcctctggctgcggctgctgctgcaagttgctgttgctgttgagga

SEQ ID NO: 40682 - DNA, 340 bp, Oryza sativa
  Clone ID: uC-osroM202030d08a1
accgaaaaaaaaaggccgtacttttatttatgataaaaaccatatttatagatacaaataatgactacggacttttttattcagcatatattggacgtaatatatgtatcttaggggcattcatgcatatagaaacggatcctttaacttagtacgctttttaactaaaatggaggtttttaattataccgaacccatatagtattagctagtaacccacgttagagggcagtttattagaggagacttgatcggcttaacgtagctaggaggggcgctccccgtaaatgttgccacccgggttgtagttgcaggcgatcagcgggctgttgcgaccgtt

SEQ ID NO: 40683 - DNA, 524 bp, Oryza sativa
  Clone ID: uC-osroM202030d09a1
acataaagacaccttctttttttttgctagctgctcacggattaaaaagcaaccctacataacttacaactccggcaaagtaaaagtcgatctctctagcaacgcacaaatgcacacggctacacataccggaataattaatatactgtattataataataataataataatcgaactatcagctaagatcgatcggtgtgcataaacacgcggaaatacggttcggtcggtcggtcggtgttcgccatgcacgcaaccgtcgcatgcaacacaaaatgcaatatagagatttaggataaaactcgagcgagagctaaggtagagctactctatggagtagcagctctgcttgaatgcctcgaggctgcggtcgaagacggggacgaaggcgtcgacgctgccgtcgccgaggtacgacggcaccaggaacagcatcccctccgtcgggaagtaggacggcatgaagtaggtcgggcagccgccgccgaagtcgagctcggagaacgggaaggtgagccagctg

SEQ ID NO: 40684 - DNA, 500 bp, Oryza sativa
  Clone ID: uC-osroM202030d10a1
gcacataaactgcagatgaaaaccatctggtcactttatacaagccgtacatcagctaaaagaagttcacgatgcctcagggctcaggcagacagaaactgaaaacgacgcagcaagttaaaaacaaattacaaaacctacatgagacaaaattaaatcgtagagatagtgtcccactaccaccaaagcaacattatttgcagaggttcctttttttcagcccacatgatcccgtggtctagttattattcgaaaatctccgtccgtcctcaaattcgatcgaattttaaatctctctctcctagaagagcttgaatagaattcctccgtgcgtggcgaagaatggcgcgaacaccagcgactcgacggccatgagcttgatgaggatgttcagcgacgggcccgacgtgtccttgagcgggtcgccaatggtgtcgccgatcaccgccgccttgtggcagtccgatcccttgggccccagcgacctcgcgtgctcactc

SEQ ID NO: 40685 - DNA, 563 bp, Oryza sativa
  Clone ID: uC-osroM202030d11a1
ctctcataaccctcgtagcatttgattggagaaacagatgttcacaagtagatacagagctaccgaaactggaagaacagaaacccgagggaatggacacaaggaacataactgaagggcaaagtgtttacattattatgattgagcccagcttgcaacaagtactaaaagtttctactgaggatttggtggcctggagttggcagcagaaaccctcgatccccattccagcagctctttgctggtgtcgtccttgtgcgcgatcacctcaatgaagcacaggcagtccttctcccccagcgccatcccgatcgcctccgtcagctcctcctcgcacttcaccttagaagtccagcatttgccctctccattgtggatggcatccacaaggccagtgtagttccagttcttgatgacgttgtatggaccgtcatggatctccacctcaatggtgtacccgccgttgttgatcaggaagattatgctgttctgtgcacagcgaatcattgttgacacatcctgtgccgtcacctggaaactcccatcaccatacaggcattaca

SEQ ID NO: 40686 - DNA, 425 bp, Oryza sativa
  Clone ID: uC-osroM202030d12a1
ttttgtttttttatattttttgtgttttttttttggggaccattccatcctcaattatgtgcataaaagggaatacaaagagaacaagaataagggaactggaatcctgagcaaataattgatggattttttttttctgtgaaagaacttgaacgaatatagggccaaaaaaaaaaaggctttactaacgaaaaggaaaatggtgcagttaggcattcaaaaaaaaaaaatgttgcagctggtatttaattacagcggccttgggggatggagcttgcctttactggaggtggaggtaatccatggggtccaggaggaggggctcgaagcggtcgagatcgagggggatgtccaggttgccgaggtagaccttggctaccttacggcacccactcggggggaccgactccgggtcgtgcaccccc

SEQ ID NO: 40687 - DNA, 495 bp, Oryza sativa
  Clone ID: uC-osroM202030e01a1
gaaatgaaatcatttcgtattttaaatagcaaaccatacagctggtgatggtattcgtcatagatacaacgcattatcaagtgttcctttccaagaatcaaagagtacagtgacatgtgctatagaatagaatcaaagcccgtgagagaaaggcccaaaaaaaagaagggaaaaaaaagaaaggaagaagaaagaaaaagtaatgaaaaaaacatgcacaagttgctgatgaaccaaaagtagcctgggggagcaagatccatgcaaagaactaagcaattctccaacttaatttccgttcgctgaggctgagatcgatgtacggtgatccagacggcaatgtcggctggtcggttatagtgaaggctcctcgccctcgccggcgctgtcggtggccggacggtcgccgaggctggagcggcggatctcgtcgatcctcgcggccacctcggacatggacggccgccttgcggggtgctgcgccgagcagtccat

SEQ ID NO: 40688 - DNA, 506 bp, Oryza sativa
  Clone ID: uC-osroM202030e02a1
ctacacacaaatgttacccggtccaactgctataaggcacagtagcaatgaccaataacacaactggtgagtggcaactaaacggggcgtaaggcaacgtccagagtgatagaaccaatattggcgtaggggatgtcgttttgcttgcacatggcgtcaatacgctccagggtcttctcaatgataacagcgctgatagggccagcattgttattgccaccaccaccaccacgacgcgcacacctgcctccccgcatacagttttcgacctcttcggcaacgtcttgggggccaggcagcaaaaccgtaccatcaaagaacaccattggactctcaaaggtgccatcataagttaattgagttgctgtggaatcaacagggggatcaactgtaaccacaactgggcccttggcaacaagggtgagttcgcaaaggcttccatccttctcatccacgcggtagatgtagttagacccagatacatacttgctaccgtccggtgcagt

SEQ ID NO: 40689 - DNA, 446 bp, Oryza sativa
  Clone ID: uC-osroM202030e03a1
acaaactaaatggagaattaatttattgatatggctaaattattttttggtggcatggttgattggtataaaccaaacatgccattttttttaaaaaaaaagcctacaatgcatgatatgaacatcacaagatcgacgatcagattgccctaagcttaattggtgccccatgcatcggacgcagcatcaacacaatatggggagcgtgagtgtaagacggcgctagctcgaactcgaagcgctggagaatcatacacagcgccatcttggcctcgagcagcgcgaagttctggcccatgcagatcctcgggccccagccaaacgggaagaacgcgccatgatcgttggacgccctggagatcccctcggcgaacctctccggtttgaactcgttcacatcgctcccccagatgtctgggtcatggtggatgaacaacaacggtagc

SEQ ID NO: 40690 - DNA, 494 bp, Oryza sativa
  Clone ID: uC-osroM202030e04a1
gacgcagcagaagatagttatttttccatggcaaatgcttaacagtctctacaacactatgtacatctgatgatctgaacataggacaggtggacacccagggtccacggtggtttaattttcacctagaaacaattgttgctttgaaatgacatcctaccatttctgttacaaccttttcacccccggataaacttaagactacaagcctaacaaccatacaacagttcaaaagataacgccactaaaacctgggaataaaaataaacgaatcttcaaggcaaccccaaccatactattagacaggctgtggatcatgatgcttgagtaggagctgtactgatgcatagtgatgaagagattctggaagttctatatctacataatctattgcagggatggcaattgacaaatcctctgtagaaaacggtatacataagtcgtcatctaataaaaaggaatttgatacgagattctgagtatctttgtttact

SEQ ID NO: 40691 - DNA, 363 bp, Oryza sativa
  Clone ID: uC-osroM202030e05a1
atatcaatggaaataccaaagggactgaaaatgaaagagaggtttgtgggagggcgacacaacaagcccgaaaggacaccattactccctttttatcatcaaactttaagacgtaacggcctattcaaacccaacaactggagtaataaagtggagctccacaggtaggcgcacagagggggccccactataagacctgttttttgcacttcgtgttgttcccctaccacctttgagaagctctcctgaaaggaaaaaatgaaggcccaaacttgaaattttgaagggaaggaggttgccacaagaaggaaaaatgggggaaacttgagggtggttacccccggttgattcttttagaaccta

SEQ ID NO: 40692 - DNA, 568 bp, Oryza sativa
  Clone ID: uC-osroM202030e06a1
gcgagaagaagctccgcctcgtcatgggcctccccgacggatcggccaagggagaaaagacgaggaaagcgacggatgggagtgaagagccgtcagattccgggcccacgacacctttgccggacaaaaagttgttagtcttcgtccttgataggctgcagaagaaggacacatatggtgtattctctgaccctgttgaccccgaagagctgcctgattaccatgatattatcaagcatccaatggatttttcaacaattcggaagaagctcaataaaggggcttatggcaacttggagcaatttgaggatgatgtattcttgttaacctcaaatgcgatgtgctacaattcaccagatacaatatactatcgacaggcacgggcgatccaagagcttgccaagaaggactttgagaaccttaggcaggatagtgatgcaagtgagccagaaccagaaccggaaattaaaccagatcctgaaccaaagccacaaccacggaggggcaggcctccaaataagaacactatcaaacagaaagttgggaagccaccggtagaacgcgctac

SEQ ID NO: 40693 - DNA, 433 bp, Oryza sativa
  Clone ID: uC-osroM202030e07a1
gacgccgtggtctggctcaggaggttctccgacggcgtcaattgcgattgccagcggctcgagggggttctcgggatgatcccgggcgccaagaggatgataatggggcacacgattcagaccgaggggatcaatgcggtgtgcggtgcgcaggcggtgagggtggatgtgggattgtctagaggatgcggtaatgggctgccagaggtgctcgagatcaatggtggcggcaccaatgtgagggtgatcacgacggatcccgcggaggcctggcagtaccggaagcagggggcggagaaggccgccatcgctaccgcggtgaaggagaagaagggggaggtaaaggaagggcttgcattgttggtaagggagagccatgggttgaaagaggtacaagctaaggcggtttaattagctcagtgcggtcacttca

SEQ ID NO: 40694 - DNA, 439 bp, Oryza sativa
  Clone ID: uC-osroM202030e07b1
ctagaccgcgcgcggccgtcctttttttttgtttctttctcgggccggttgctgtcttttctgctctgtggcttttccttctctgtgctcttgttcggctaagcctcgcgggctacctggctttctcaacaggaaagcagcgcccccccgttggcccatagcagcctcgggggcccccccccccaaaaaaccgggcggtccgggggggcgccccccggagggggcccccccccggggccccccccccgcccctctgagcccgggccccccaggaccccggcccccccagagggggccccccaaaggcccccccccccggggccccccccccgcgcaaggtccgccccctgaggcgggcccactgccaaccggggggcctccctccccaacagggcggccccccggcgacccccccccgtcaccccccccccgcgggcgc

SEQ ID NO: 40695 - DNA, 550 bp, Oryza sativa
  Clone ID: uC-osroM202030e08a1
cttgaacaggctaagaggcggcgaaggccgaattctgcagacgccttggttctcttgcactgtacacctcaaccttcgccacggaaaagcacaaggtatccctcagcagcagatgttacccagtcaagagttttcacctcctctgcctttttgactcagccttaggctcatactttgttgaacctgcatatgcatgtgaaggtctctttgcaccgttttccttgacacaatctgagcacacaaagtgatctagttttttggcctgctcaatcgtcatgctcatgcatgaaggatgaaaccagtccttgcagtcatcgcactgcaccatgagatcatccgggttgtatggcatctcacacttgcagtatacggcgacgcggtcgggggtgaaggcgcccgtggcggccttgtactcgaagcggcagaagaagtcctcggggccgacgttgtcgagcttgggtagttcttgaggagtgacgacgcacttgccctcgaggtgttggcgctctgcatgtcaaatggtcggagagaagagctccttgcgccatgg

SEQ ID NO: 40696 - DNA, 436 bp, Oryza sativa
  Clone ID: uC-osroM202030e08b1
gtgcttctcccagctgcccacccatctcatggccgtcgcctctagggttactctccccacctcccccctcctccacctcccaaaacctcgccccctcgccatggccaagaccaagcagggcaagcgggacgtcgactcctacaccatctccggcaccaacaaggtcgtacgagtgggggactgcgtgctgatgcggccggtggactcggacaaccagccgtacgtggcgcgggtggagaagatggagctggacgggcgcgggagcgtgcgggtgcgggtgcggtggtactaccggcccgaggagtccaagggcgggaggaggcagttccatggcgccaaggagctcttcctctccgaccacttcgacatgcagagcgccaacaccatcgagggcaagggcgtcgtccactcccttaagaactacaccaagctcgac

SEQ ID NO: 40697 - DNA, 488 bp, Oryza sativa
  Clone ID: uC-osroM202030e09a1
gggcgctcttgccgcacccgggcaccgtgcaccgcttcccgccgccgtgcgccacgcagaagctggtgccgccgtggacgctcttggggcagagcccgccgccctcgaacatgcaccgcttcccgccgccgtgcgccttgcacagcggcgtgctcccctccgcgcccttgaggcacccgtcgaacacgcaccgcttgccgccgccgtgcgccttgcagtacagcgtgctcccctgcgcgccctttcggcagtccgggtactggcaccgccgcccgccgccgtgggagatgcagagcccgaccctcccctccgcgctccggatgcagccctcgaccgaacacctcttccctccgccatgcttgatgcaccgcccggacttcccccgcgcggccttcgggcagccctggtgcccgcaccggcggcccgcgccgtgggcgatgcagtgatccgtcttcccctcggcgctcttggtgcagccgagctgcatg

SEQ ID NO: 40698 - DNA, 438 bp, Oryza sativa
  Clone ID: uC-osroM202030e09b1
tcgattggagtcgtttcgtctcgtctcgtctcctccgtttgagattccgagattctactagctataggacttttcagtctggtaaattttttccatcagacagaaattatctggctacaacctgctgcttcttgatgctcaactaccagagaattaacatcactatctcagatggtctagcccgtcagagttgaagtacagtctggatcaaaattttcctgaaatccagacagtaagttcatggacagggcggacacatcgggttttgtcagtggtggactcatcggattacttagcctagatgaataacggttttccggaaatcattcgccgcggaaacccgcatctgatggataattccgcagttgtgataatgggacactctgtggcaagctacaccatgggacagccatggacggagctcttcttgcctagacc

SEQ ID NO: 40699 - DNA, 209 bp, Oryza sativa
  Clone ID: uC-osroM202030e10a1
tttgtgttttttatttttttttgtttttttttttttttttttttttttttaatatcaaacgctcttaaaattaaatgattttgtttctaggaggacaacacaacaaccccaaacggacaccatccccccttcaacaaacaaacattaaaactcaaccccctcataaaccccaacaacaggaacaacaaaagtggtgctaaacagctagg

SEQ ID NO: 40700 - DNA, 421 bp, Oryza sativa
  Clone ID: uC-osroM202030e11a1
ctactataagtggcagttgtacatttttacaaacaaaggaacatgcgttaagttgtattactagtttcatcatcttcttttttattgcttgtaacccccatctcatccttccatcatacaagatgcgaggaggagctacacacttttgttttcaagtcacagtaactacttatcaacagtaagttctcgacaacattatgtttatttcattttttgactaaagttaaccgttgtaactaattaattaattaattaattaattaggcaacaattaattaattaattaatcaatcagttgaagatgtcctggccaggggagagcagcttcttggggtcgtacttgtccttcctctgcacgaagcgatcccatttggcgccaaaatgcctcacccagtcgccgcggctgtcgtagtgcgccagg

SEQ ID NO: 40701 - DNA, 523 bp, Oryza sativa
  Clone ID: uC-osroM202030e12a1
tttttgtagaagcgaataagtaaattccacgacagtaaacaattgcaaatcgtaaaatgacgacagaagaagtgataaaccattatccctttaagttttttaattgaagtacagttacacgaggataagtagaatccatgaccaaataaagcgagaccagatatctccaatgcttcgggcgcctgcgagattgatcaagaggtggttgcaaggaagacacaaaggagttgatttatttcttctcatcttctggcttgtctgatttgtcttccttcttctcttgctcgccctgcccatgcaatgatgccagcaaatctttcacagaggggtcattggggtcaacaccagggagagagttaaggatggatgtaacaaatgatctgtcttcaaacaccttgctcatatcagactgactagacccgcctgcgtcctggacagacatttgaagagctagtgccaagtcctggtcatctacagcagcctctgccatagcagcatcagccgctgcagcccctgaagaacc

SEQ ID NO: 40702 - DNA, 432 bp, Oryza sativa
  Clone ID: uC-osroM202030e12b1
ttcgtttgtatcatcttgctccccaaaccaagccaaccccctcgacggccggaacacatcggggggacgcagccatggtgctcgaggcgacgatgatctgcatagacaactcggagtggatgcggaacggcgactactcgccgtcgcgattccaggctcaggccgacgccgtcaacctcatctgtggcgccaagacccagtccaacccggagaacacggtgggcgtcatgacgatggccggaaagggcgtgcgcgtgctcgtcactcccaccagcgacctcggcaagatcctcgcttgtatgcacggacttgaagttggtgctgaagcaaatttggctgcagcaattcaggttgctcagctggctctgaagcatcgccagaataagaggcagcaacagcggattattagcttttattggaagccctgtgaaa

SEQ ID NO: 40703 - DNA, 457 bp, Oryza sativa
  Clone ID: uC-osroM202030f01a1
caaggaaggggattaacttttacattccattttccatttcatttggtggtcactaattaacatatgagatggccagcgcagggcgatggaggagggacccctcgaggtaattaagcttcaaaaaagggaagctgtatagcaagcacggcggcgcctcgctgcgccgccggccggagctcgtgcatgggagggggagcatgtacatggccgtcgatccgtcgtcgtcgccggcctagctcgcctctcaacccagacccttctcgtcctctctctgtgtgtttgattacccatttttaccacgatcatcctacgtacgtgcacacgagcatgtaggcacatataaacatgtgagtatgtgacctttacgccacctgctgcacgccgaggctaccgcccggcgagtggtggtgctgctcctcggggatgctcgcgagcgccgggcgccacgccacccgcg

SEQ ID NO: 40704 - DNA, 411 bp, Oryza sativa
  Clone ID: uC-osroM202030f02a1
caaggacggggaaaaccgcttagaattcgtttttcataacatgtggagcaaacgctacagcaaattatacgctttgaacaggcccagatttagcagggctcttggctggtacccaaattacatcacatgaacaggtgactttctacgcaacggggaagcctgtggtgaccacaaaatatctcaagcattttgcatgggatgggggtggctattccatggttggcgagacctatttgtcccagccatgcttgttgtgatcgccaaacacgccattctttgggggcagagggtccatatagtggaggctgcaccttcgccaagccatttcgttctgaggacatagcgcctatgcgggtctcggctaataacaactgaagaaagcttggaagcgccaatagcccaagccggggg

SEQ ID NO: 40705 - DNA, 444 bp, Oryza sativa
  Clone ID: uC-osroM202030f02b1
gttagttatatcggatttcacctgtgcatcgtttcaacctgaaaatgcgcagatattgaaccagcatatggcaggaatatctatggtaccaaagcaaggctcagtagacgaaaacagggacagacacactatgctttggggagaaaggtctaatgggaattgggaatgacggtatcgctgtgcattcatgacttgacgacaatggcgctcaacaggaatatacacatgagggtctacactctcaagctacaatggacacaccgacaaatgaggctagaatctggaacctgaaactatacgaggaacactacactagatgtgagacacccagatagatagttgttgcctggaacaaaggctaccatactaccagggacgcctctgaatgaacagtccatgtcagaataggtgtggaagaaatcaacgtgagtaacaaccgagtga

SEQ ID NO: 40706 - DNA, 446 bp, Oryza sativa
  Clone ID: uC-osroM202030f04a1
agggctcttcagaattcagtgtacacgatcaaattcttgcaaacacgccactttctcggacacaatttgatccaagaaagcgtgaacatgatcactgatcagtgcaaagcacaaatatcgatttcagtggcatatatagccttattattgtcccctcatgcactcagaattttcgttgatgatcaccgctaattaattcaccttggagcagacgagcctgatttgtccctgcgttcccgtcaacggggcgatgttccccatcttcaccatggccgccgcgaagtcccttctgaacctcgacggcccggacgcgtacgaccggacctggccgtcgacggcgccgccgttgaagagcacctggtcggagtgcaggagccccttgttcgacagcaggttggtgtagtaggcgttgtcgaacgcggtgggcgttgtcgtgtccagcggcg

SEQ ID NO: 40707 - DNA, 501 bp, Oryza sativa
  Clone ID: uC-osroM202030f05a1
cccacaaaagaatggaatttcagtacaaccaataatccaagccactggtacacaatggcaccaatccgtacacaaattctcctatacaaatcaaaacaacagcacatacacagatacactcaaacacgccacaaaaattatagcaaaataacacaaactaatttaatcgattggtcaatcaaccaacagccaaatgaataatctgatgatgagaagttgaggctttcagaacagcatggcagctagcagcagcagaaacgcaggaaaaccggcattggtggcgaccctccgtgcagagctgggcaccacctgcggcctcgtctgcgtctggctcgtcgccggcggcgtggcccgcgccgtcggcgatccggcaccggccgtcgactccggcggacttggcggcagtggtggcatggccggagaaactgcaacgggtacttctgccgctggaatctgagctgatgtatttttgcattggaggggaccagacatgcagttgca

SEQ ID NO: 40708 - DNA, 485 bp, Oryza sativa
  Clone ID: uC-osroM202030f06a1
tgatttttaggttagtgtaaatagtagcagtagttgaggaagcttcggcatcctaaggacctcctgtgaagatgtcgtctgctgccattgccattagcccgatggtggaagagtttgctctcctgcccatctgcttcgacggcagccggtcgccccactgtttgtccgggtcacagctgcaggattcgattatcatctttcttgctgtgcctggtgccccaccgatgccgatgagtgtgctcggctcggagtccatcgcctcggtcaagctgcgcattcagcggttcaaggggttcgtggttaacaagcagaggcttgtgcttgatgggcacgagctggcaaggaacaactgccatgtgaaggattatgggcttgccgatggaaatgttctgcaccttgttatccgcttggctgatcttcgcttgattaacatcgagactaccagtggaaagaagtttcagttccaggtggacccgagccgcaat

SEQ ID NO: 40709 - DNA, 167 bp, Oryza sativa
  Clone ID: uC-osroM202030f07a1
atagggaacaataatcaccaatggatcaacaatgcatagcgttatggattgaacaacccatgtcacgaacagatgcatgagctatcttctatatatttccggggctacatataaccttcgtgttcatttgtggtatttacatgggatgactattttccaggcttaca

SEQ ID NO: 40710 - DNA, 242 bp, Oryza sativa
  Clone ID: uC-osroM202030f08a1
gtccttgctgctgcatggcagctaattccggtttatgtttgctctaatttacaaattacattcatctctcgagaccgatttcgtgctcaatttcgcgtgcatgaataagatataattcatggaggcgacgatcaaatacacagcaagaagtcgagaagagatcggggaaaaaaagacggcggattcgtggctatggctagtagtgaattgatcactaagcttagttggccttcttggtggtg

SEQ ID NO: 40711 - DNA, 525 bp, Oryza sativa
  Clone ID: uC-osroM202030f09a1
ggccgcctcgatccgctccagctcgtcggggcggtcgggcttgtggtcggaggatagctgcacgggcgcgccgccgcggcagagcacggcgcgggagtcgccgcagttggcgacgacgacgcggctctcctccacgacggccaccaccgcggtggaccccacgtggtcgcacttctgcccctcgcaccggcagctgccgctctcggctcggcagccggcgatcacctcggcgtccatcctcgcgaagctccgctccatcgtctccgtccaagacgccggctcgcgcgccgccgccgccggtgacccggcgccaatctccttcgcgacgagctcgtgcatccgctccctgcacgcgtccgccacgtgcgagcagccgtgcccgtcgaacaccccgtagaagtcacacctcgccgtcgcaaccttcccgttcgccggtgcggcgaacgcctcgcgcagcgacacggtgttctacatcttcttcttctcccgcgaccggacgcgcccgtgccgtttggcacaccacca

SEQ ID NO: 40712 - DNA, 440 bp, Oryza sativa
  Clone ID: uC-osroM202030f10a1
ggaaacacaactcattttttattgatatatgtgggatgaatccaataaaaccgatccaagtcacgaaaaatcagactagatgaatccttcgagatcacatgagcaaaagctttcgacgaaagctgtcctatagtcggggaagcaataacccttgataaagatgggaattcaaacccgaggggttgcaaactataagatgtcatcaaatttccttgaacgccgggaagagatcaccgttgatgtagccgttgcccacaagactaaccaagaagtggcttttctggaccttggctaggatctccctagatgagccgccctcagggaacaggcaagcccaaccctttgaccaaatttcgaaaggtttgtttttccaaaccataaagctggctgagtcaacgacaggtggctggactatttccttgccagggaaaacaccccat

SEQ ID NO: 40713 - DNA, 425 bp, Oryza sativa
  Clone ID: uC-osroM202030f10b1
tcggtcgcagcagcagcatcaggggaagggtctagaagcttctagaagcttcttccgagatgaaggtgatcgagaagatccaggaggcggcggcggatgggcggacggtgttctcgttcgagtacttcccgcccaagacggaggaggggctcgacaacctgttcgagcggatggatcgcatggtggcgcacggccccaacttctgcgacatcacctggggcgccgggggatccaccgtcgacctcaccctcgagatcgccaaccggatgcagaacatggtgtgtgtggaaacaatgatgcacctgacatgcaccaatatgccagttgagaagattgatgatgccttaacaacaataaagtctaatgggattcaaaatgttctggctcttaagggtgatcctcacatggtcaggacaaatttgttc

SEQ ID NO: 40714 - DNA, 348 bp, Oryza sativa
  Clone ID: uC-osroM202030f11a1
gagcgcggcgcctccgcctgcgcctcccgccgctggctcgccctcctctgcagcatccgggcttccgagctcaaccaggccaccgctgctgccgccgcggcggcgccgccctcccttcccgacctcaacgaggagttcgtcatggaggaggacgacgaggaggaggagtcgtctcccgtggtggatccgcgcgtcgagagggtcctcgagggcaaggaggccaccgacgttccgcctcgcccgccatggccgtcgacgccggctccccgccgcgggtctggagaagcctagccggctcgcgggagccccccccacggcgctgcgctatccgacccgccacccctctct

SEQ ID NO: 40715 - DNA, 377 bp, Oryza sativa
  Clone ID: uC-osroM202030f11b1
cacataaacacatacttaatttattctgagaaggttgcaaagattacagtcctcaacaatatgccggtaaaaacagggatctggtgaaaaaacaaccatacaaggctgtcatgacaaggctctagtatgcgccttgcaatggccagatcccccaacaccaggcattcccaagagtacctgtaacaaaaaatcaaccctctatgacccttacacactaccgaaaacatcatcacacatgacctcaagacaccaacagactcagtaaccatacacacagggtaagtctgcaggcactccagcgtcgtcggcagcctggaacaccggcgctgccgactactggtgacaccggcagttgagctgcggaacttcatgacagc

SEQ ID NO: 40716 - DNA, 500 bp, Oryza sativa
  Clone ID: uC-osroM202030f12a1
tttttgttttttttgattagggatcacttattcattatagttcttccatgctgctctaccacagcaaaacgtttcagacaccatcaaaccagacttaaggatacacattacaggtaaatagtacacaatgaaacgggacacgaccaaggaccagaccagacaaccatagctccattggggaagacaaataggcagacttgtgaaccctagaacagcagcagctccatggctgaggacttactggccaccacggaggcggagcaccaggtggagtgtggactccttctggatgttgtaatccgcaagggtgcggccatcctcaagctgcttaccagcaaagatcagacgctgctggtccggggggatgccctccttgtcctggatcttcgccttcacgttgtcaatagtgtcggacgactcaacctcaagggtaatggtcttgccagtcagggtcttcacgaagatctgcatcccacccctgagcctgagaaccaggtgaa

SEQ ID NO: 40717 - DNA, 428 bp, Oryza sativa
  Clone ID: uC-osroM202030f12b1
ttcgtttgaggtcgagtcctcggacacgatcgacaacgtgaaggccaagatccaggacaaggagggcatccccccggaccagcagcgtctcatcttcgccggcaagcagctggaggacggccgcacccttgccgactacaacatccagaaggaatccaccctccaccttgtgcttaggctcaggggaggtatgcagatcttcgtcaagaccctgactggcaagaccatcacacttgaggtcgagtcctcggacacgatcgacaatgtgaaggccaagatccaggacaaggagggcatccccccggaccagcagcgtctcatcttcgctggcaagcagctggaggacggccgcacccttgccgactacaacatccagaaggagtccaccctccaccttgtgctcaggctcaggggtggtatgcagatct

SEQ ID NO: 40718 - DNA, 476 bp, Oryza sativa
  Clone ID: uC-osroM202030g01a1
acgccgtgatggtgccgtacccggcgcagggccacgttacgcccaatgctgacgctggctgagctgatctcctaccgtggttttgacgttaccttcggcaacaacgagatcaaccaccgaggactcctccgtgcacgcggagcccgggcgctggacggggggcacggataacgatacgccggcatggacgacgggctcccggcatacgacgccaacgccagccaggacaagccggccctctgtcactacgtacggaccacctgggttcccagggtcatgtcgctcgtagacaagctcgacgaccaggccgtcgccgccggcgacagggacggagcggcccggcacgggatctgcgtggtcgtcgacaggcacatggacgtcggcatgcacgccatgcgggagcttggacttcggtgtaccacgctctggaccggcagggcgtgcgggttcatgggctactaccactacaaacacct

SEQ ID NO: 40719 - DNA, 377 bp, Oryza sativa
  Clone ID: uC-osroM202030g01b1
aagcacattgcacaaacgtgggatagagacatattatctctcaggccatgagcacgctctgggatcagcctatcgatgttgtgcacggaccggtcagggggcttaggcgacgcgacagagctctgcctgagatcaaccactcgcgcgacctatttccaatgcagttctatgacgctcatggccgtgcagatcagcgcctccacctcgacgggccacaagtcggagaaaatcttcgcccacatcctccattctaagcgcttgaacactgagatagtctaggtgttggcgaagaacctgcaggagaccatgacgacgccggcggcgatgatctacagcgaggacatccagcccgagtgggagatgaacacccccaccgt

SEQ ID NO: 40720 - DNA, 337 bp, Oryza sativa
  Clone ID: uC-osroM202030g02a1
gctcacaaatccacaagatcaattcattgttcccgtcctggcgattaaagcattcacagttaatttacagatcgaatccaactctttccttttcttttgatgaaaagcagaattcaattcaacttgtgaatttgtgatatacgcaaagctcaaatcaatttagcagaattcatcatctacaagtagcgagtcccgggttgggggtacaagctgtacggcgctcccgccgttttttgatccgggaaccacgccgccggcggggggaagcacggctcgcccggcggcggcggactccgcgacatgtacgacggcagcgcacggtccaccgagcgatcgc

SEQ ID NO: 40721 - DNA, 387 bp, Oryza sativa
  Clone ID: uC-osroM202030g03a1
gctggtgctcccgctcacgctcgcctaccccaacgccacccgcctccccgcctcctcggccaggcgcggcctcggcgatggacacaaccccaacgcccgcatgcgcctccacgatgatctcctcaccaacgggtattacacgacgaggctgtacatcgggacgccttcgcaggagttcgcgctgatcgtggactccgggagcaccgtcacctacgttccctgcgccacctgcgagcagtgcggcaaccaccaggatccacgattccaacctgatctctccagtacatattcaccagtaaaatgcaatgttgattgtactcgtgataatgagaggagtcaatgcacttatgagaggcagtatgctgaaatgagctccagcagtggtgt

SEQ ID NO: 40722 - DNA, 391 bp, Oryza sativa
  Clone ID: uC-osroM202030g03b1
gaagccgaatatcctcagcacttatcagatactagataatacaacattccgtccatggctgctgcgcttttgtaccttgctctattctacttaatctacattacacgaacaaaaccttcttttactgtaagctacaagaggaagctcttgatctgaatcgctagacagtttatgaacagaggctctaagttctgaatcgagaagctatggaatcttgggcttcttctgtaagcttgtagcttgggttacatacaaagaaaaagggtaactcccagcgggggatgtgaacccgctgcaacatggcagcccgcacaacggtatttttaccaaagaatcgcctatatgtttactccgttgaaccactccaaattatagcggttggagcttttgc

SEQ ID NO: 40723 - DNA, 371 bp, Oryza sativa
  Clone ID: uC-osroM202030g04a1
agcgcggcaataaaacattgcattgaattctgaacgataaacaccaggaaccggcgtttatttgaggcaagcactgcccaaaatcttgcaaaagtactgaaaccttagacatagtacacatccatggcaaacatggatgccaaatgacaactacagaaaattatcaaattcgaatgcagctgacggcttctcctgctgaagatgcatattttcccctccattacttggatgggctctctccatcgacagccaatgggacggcgctggccaggctgcggtatttcagagcatagaacatctcaatgtaacggcgagtctcgcgcctctcaaggttggttacgtacttccagaatccgtatacaccagtcaag

SEQ ID NO: 40724 - DNA, 413 bp, Oryza sativa
  Clone ID: uC-osroM202030g05a1
acatataatcaagtttttacatgcaaccatacgtgctacacactctgaactattgcttcttaatatgtgcatggctaaatatatatatactcgcatatcctctgcaaccgatcgaagcttccggtcgccggaggcttacacggcggcgatggccgccgccggcggtgagaagctccggtagagaaggccgtcggcacggtggttgtcgccggcctcgtagtcgtcgtcttcgtcgtcggcggcgccctcgtcgaagttgagcgcgtagctgaggggatcataccggaactcccccggcgagccgacgcggcggcgccactgcgccaccgtgtcgccgaggccacctccgccgccgccgtcgccgtagccgaagcagcagcacaccgtggccctcagcctgtcacgcagcgagc

SEQ ID NO: 40725 - DNA, 463 bp, Oryza sativa
  Clone ID: uC-osroM202030g06a1
ggaaaaaaaaagggaatatggggggaaaaaggcatccgaggaatttttcccctttttttccttgggggaaaccgtccttttgccaggacaccttcgtgggaaccggtaaaaaggaaaaaaaaggaaaaaaaaggcttcctaaattttttttttttgccattggcttgggttccccccggcccagggtaaaaccgggggcccgttgggtttaggggggtatttgggggggggggcaagccactgggcctccccgggggggggggccccccggcccaggggccccccctggcccttgggggcgcgtttccagtccagggcttggaccgcccggaagcaatatttggccgccccgaaaacggagcaccgccggaactggggggggggggtttccttcgggccgacccgaacgggggagcaagggcggagttcgccccccccgtctttgtccccggggggggaaggg

SEQ ID NO: 40726 - DNA, 541 bp, Oryza sativa
  Clone ID: uC-osroM202030g07a1
gaataaaatataaatatttacattattcatactgcaaataaggagaagtgcacctgtgccaatcaaagttcccacgcaaacaccaagaaatatagccttgaaggcgtgcccaagcgcattgagcagtgctccagtgctagagagacatcaatccgtggtgtttgtcgaaggcgttcattggcaaagcaaatcccaggagaatgatagatacatccaacccctgaagtataatcttgaagtaaacttgacagatcaagtaacaccatgaggaaataaacgagcatcgctcctctagaaccgccatcagattttggtgatcttgtcagctttcacaagaggattctgtttggcaatctgctccctcccgacctgcttgtaatcaaatgtgcatttgtgtgaatcggcatagcggtgcattgaacagaaggtgcctccgcagcggcacttgaatcctgtcaacccaaccttctttcggcatgataagcaacggttactgggtggctttgtggatcctcctccttacttgttcccactgcactga

SEQ ID NO: 40727 - DNA, 420 bp, Oryza sativa
  Clone ID: uC-osroM202030g07b1
tggtgaaggcgacgcgaaaagcagaaaggaaaaaaaaaaaactccgttctctcctggaagaacaggttggggaaggagaggagaggagaggagaggttgttttttttctgtttgtctggctttcatttttctgatcgatcattcctttgctgctagtcttttctcctttttatatttcttctttatctatatttattttttattgcatggtgttatgtttttttccttgttgttctgtctgtttatgttttccttttttttctttgactatgttctatacttttttattagtttttatttttttttttttatttttgttgctttttattctcttttttgcttttattcttcctttttttttttgttttcgtttttccttctttttttgtttgtttgttttttttctagtctttttttttt

SEQ ID NO: 40728 - DNA, 532 bp, Oryza sativa
  Clone ID: uC-osroM202030g08a1
ctttgcctcgttcgtcctccggttttctccgcagtttcttgatccatccgcctttcctctcgcagccgtcggcggggggagtggttagttggttactggcttgcagagttttcagagagatttaggcaatggcggaatcaggccaatcgattgcgagtgatgtgactgcactgatcggcaatactcccctggtgtacctgaacaaggtggtggatggatgtgaggcccaaatcgctgccaagcttgagatcatggagccctgctccagtgtcaaggataggattggttatagcatgattacagatgcagaagagaagggtctcattactccaggaaagagtgttttgattgagcctactagtggaaatactggtattggccttgctttcatggctgctgccaagggttataagctaatcctgacaatgccagcatccatgagcatggaaaggaggatcattcttaaggccttcggtgccgagttggtccttaccgatccacttctggcatgaaggtgcatccagaagcatat

SEQ ID NO: 40729 - DNA, 401 bp, Oryza sativa
  Clone ID: uC-osroM202030g08b1
ccatggaagcttcagtagctaagatacacatttcagtatggaagaaagtacacatatgaactgctcatataacaccaggaaagctgatcgaatccccagactttgattgatgtatgtaagttctttattcagatcaagcgactacatgatggcaagtgcgaccaacatgaagaaatgcactcgggacgccattctctccaagccccctaaaccatggaagcacaatttgcacaatgctggagccgttcatggctcgaacaccatgttttcggcctccctcttgatcgattcgaagaggacagacgacaggtagcgctcaccgaagctcgggaagaccacaactacgagcttccctttgttctcgggccgctgcgcgaccctgatggcagcgactgcagcag

SEQ ID NO: 40730 - DNA, 486 bp, Oryza sativa
  Clone ID: uC-osroM202030g09a1
gatgtaaacataccaattcacactggtaaaaccctgagtacgtacgtaatcacctagatatagccctattggcacatacagatgagacaggcgcccgtgaccaagttttgatgtcacgtataccttattgcacagatcggaaagctacaagcccacaagaggacaccgtgatttcagaaagggaaaagaagagaatacatagactgcacaagccgttctcgtgcatttgctagcagcagcttggctctagatgagatagcggtagatcatcttaattaatcttaattcttaattagttgcaggactccttggcgaagccgacgcgggagttggcgacgtcgaagacgacccggatgttctgctgctgcaggttggcgatgacgttgacgacggagttgacgttctgcggcgcctcggccatggcgaggcaggccagcggcgtggcgctgctgtggatgagcgtgttctccatcggcagcgccaggt

SEQ ID NO: 40731 - DNA, 478 bp, Oryza sativa
  Clone ID: uC-osroM202030g10a1
gactcaaaatgtactaatgcattattaacatcccggcctcagacagaaaactccaatcacacagcccaatattacaaaccaccaagaacaagaataatgtaaagaacaaactagtcaaaatcaaataaatttaaacatggagagaggaagaatgaaagaaaaggaaaaaaaggaaaaaaaaagaaaagaaaagaaatgcatgcacatggctagcttcctcgaccatcgggtccgtacaccgtcttacaagaggcagccaacaacggcggcgagcccggcgacgccccagccgacggccctggcgctggcggcgcccgtgggctcggcgtcctccgcgccggcggggccggaggcggcctccgtggagccacccttcttgggcttggcggtcgacgcggtgggcgcggcggcgggggccttgacgccgaagagctcgaaggggaggagcaccttgtcgacggagtagacggcgagcggc

SEQ ID NO: 40732 - DNA, 417 bp, Oryza sativa
  Clone ID: uC-osroM202030g11a1
actccagaccaaacaattacttcaaaattcttaacttcatcatcaagaccaaacaaagcaaacgcatagactcaaaaacattcatttctcatcagaaagcaaatatgcagctggcaagtaatcccaacaaactattcagaatatctgccattgacacaggctaggatgttcacgatccacaactagatagctgtttacttggtgtctaaataaacgggcagcaaaataagggataatctctactcggcagcagcgacctcctgcccggccatggcctcatcttctgcaggcctatcaagcttcgtaccgatgtcctccttggcatagtcaccatgcacctccatgagcttccccaggtcaaatttcggggcctttagaatcttcactttgcggacaaacacattctgaagggggaaa

SEQ ID NO: 40733 - DNA, 431 bp, Oryza sativa
  Clone ID: uC-osroM202030g11b1
ttcgttttctcgcgccgccgccgccgccgagcgcctggagcagcgtcagccatggccgtaggtaagaacaagcgcatctccaaggggaagaagggatccaagaagaagaccgtcgatccctttgctaagaaggactggtatgatatcaaggccccgtcggtgttcaatgtgcggaacatcggcaagaccctcgtgtccaggacacagggtacaaagattgcttctgagggcctaaagcatagagtgtttgaggtctccttagctgatctccagaacgatgaggatcaggcgtacaggaagatcagacttcgtgctgaggatgtgcaagggaagaacgtgctcaccaacttttggggcatgtcgtttactaccgataagctcagatcacttgttaagaagtggcagacactgattgaggctcatgtggatgt

SEQ ID NO: 40734 - DNA, 550 bp, Oryza sativa
  Clone ID: uC-osroM202030g12a1
tttttgttttttttttttttttttttactccagaccaaacaattacttcaaaattcttaacttcatcatcaagaccaaacaaagcaaacgcatagactcaaaaacattcatttctcatcagaaagcaaatatgcagctggcaagtaatcccaacaaactattcagaatatctgccattgacacaggctaggatgttcacgatccacaactagatagctgtttacttggtgtctaaataaacgggcagcaaaataagggataatctctactcggcagcagcgacctcctgcccggccatggcctcatcttctgcaggcctatcaagcttcgtaccgatgtcctccttggcatagtcaccatgcacctccatgagcttccccaggtcaaatttcggggcctttagaatcttcactttgcggacaaacacattctgaagggggaaaatactggatgtcgccttctcaatttccttcccaataactttaggaatgaactttgaaactagctctttcaaatcacagcttgaagcctggttggccatgatttcaac

SEQ ID NO: 40735 - DNA, 276 bp, Oryza sativa
  Clone ID: uC-osroM202030h01a1
ggcaccacgtcacaatcatgggatcacatttccgacagtcatacttaacacaaccaaaactatacatatattgtacttcggtctcatcctttgagtcagacgacagcaaaatacatcacgaggttttcacggttatatagatcgctgttcaaaatagtacttaatagagcaggacacactgacgtcactgagcaagttgacaatacctctggttggtgctgatggactggctagttatcactttgcatgctcctgatcatgttcaggatataaagg

SEQ ID NO: 40736 - DNA, 439 bp, Oryza sativa
  Clone ID: uC-osroM202030h01b1
tgttgctagcagaagtccaggtggacaagaacgcgaggaggggaagaatcatccccgagatctcgctgccgctgctcatggcgttcgcggcgtcccacaccgcatcgccgtcctcctgcggcggcgtggcgcagaggaggagcaatgggatgtcgccggtggtggccatggcctccaccatcaacagggtcaagactgctaagaagccctacactcctccacgtgaagttcatctccaagtcaagcattcactgccaccccaaaagcgggagattttcgattcgcttcaaccttgggccaaagagaaccttttgaacctcctgaagccagttgagaagtcatggcagccacaggactttctgccagacccttcttccgatgggttttatgatgaagtaaaagagctgcgggagagggctaaagagatccctgatgacta

SEQ ID NO: 40737 - DNA, 369 bp, Oryza sativa
  Clone ID: uC-osroM202030h02a1
aatcagaggaaaaagccgaggctatatatatcaaggatatcgcatccactcggagaaagaggcacttttattttttttctgagggaaaaaaaggggcaaaagaatccaagacaacccattgtcaggaacatggcttccaaaggccagagctcctatataacacgtaactaagagcaatctaatcctataatcctccccttaaaaagaaaaccccctaaatgaatggaaaacggttttttcgatcaaccattcattaatatatgtacagttcgccgaaaaccttggttgtcaaaccatattgctaaggggtggccagtaattaacgccacaacttccaaacgggcagtggcactgacaatgccaaatagc

SEQ ID NO: 40738 - DNA, 417 bp, Oryza sativa
  Clone ID: uC-osroM202030h03a1
ggagcagcaatttactttctagttgtgaataaaaggtgataataagttcagacaaattgttgctacagcttaagctacttgcaaacatcttttttcacagcacgacagacagcaaaattaaatactaggactaactcttccctcacttaatacagataacagtgagacatataagcaacaaatgaactgctgttaagcttgtctttttattccgtccgttcatcgactaccccttggaaccagctctacggaagggaagctgtaagagtgaagcgcatcgccttggttagggaatttgtaccgtgccagtacaaaaaatgtaacacttcaaactcctcatcattatctttctggttgatcagaacttgatgctccattaggaggtgtggacaaagcgctggttgatccattctctgc

SEQ ID NO: 40739 - DNA, 522 bp, Oryza sativa
  Clone ID: uC-osroM202030h04a1
cactcaatccaagctgtgaaattcccagcatatgccacgttacaacctttggtccttccacaaaaattgaaaaagaaaaaaaaagcaacatttttagaaggctaaaataaacacttcaagaaaccgaacatttacaattccagcgcctagaatttattccagggtggcgagatgccatgcaaggcttgaacagagattcgacactcagacaacagttccaaatccatgaccgatgcgatcgctgggttgattatgactgctgtatatcccgaaattaatctcatcatgcaacatgattagtcaccagacttctcaagttcacacagccaagtggttgtcaatatcaaaactgcgaagatctgaagcaccagttcctatccttttgtttatagggcagtagtggaatttgatatttccggacttgacatcttcaagatacatcctcaaggtgacaatgatcgaagaaaatgctagagaatcaaatggtatgtcatccaaggcaaaaagtgcacattctagcga

SEQ ID NO: 40740 - DNA, 457 bp, Oryza sativa
  Clone ID: uC-osroM202030h05a1
ggaaaaaaaaagggaataatgggggaaaaaggctcccggggaatttttccctttttttcccttgggggaaaccgcccttttgccagggccccttggggggaaccggtaaaaaggaaaaaaaaggaaaaaaaaggtttcccaaattttttttttttgccattggcttgggttccccccggcccagggtaaacccgggggcccgttgggttaaagggggtatttgggggggggggaaaaaacttgggcctccccggcgggaggggccccccggcccaggggcccccccgggcccttggggggcgggtttccagacaaggcctgggccccccgggaggcataagttggccggcctcaaaccgggcaacctccggacttgggggggggggttctccttcgggcccccccgcatggggggacaaagggggagtttcgcccccccttttttttgctcgggggg

SEQ ID NO: 40741 - DNA, 527 bp, Oryza sativa
  Clone ID: uC-osroM202030h06a1
gacaaaactgcaaaagttcacccttaagaagagggatatatatatagcattggttctgcacttctgcatgctaaagtactccacatgatacagcaggctggctttccatccataaggttacaaatgggcaggattgccgtttctgttataaaccaaaggagttgcaagttagagtaaagcatttatagtcgcatcatgcatacagtttcagtacaagatacaacacacagcgaactggcaatagattgcttttttgtaaatcttagcactccaatgcagcttgagcttgattagttccaggtgttgacagacggtcctgtgactggttgctcatctagggcacggcgcaactcctcagagaagttcatctgatgaggaagtttcatgtgaccatgaccccatgatgatccactagatccagagtacatcaccggcttatcaggggaatcatatgactgatcattgtacaagttcattgctgcagccaacggtcattgagaagcttggcagcctcactggcacaacat

SEQ ID NO: 40742 - DNA, 81 bp, Oryza sativa
  Clone ID: uC-osroM202030h06b1
ctcttttctgcatctctctctcgtcgggaggagaaaggaaggaagagggtggcaggaggaggatgactccccttccattct

SEQ ID NO: 40743 - DNA, 419 bp, Oryza sativa
  Clone ID: uC-osroM202030h07a1
aggaagaaaatatggcaagaaagggaccctgtccactagaagttttgtacatttcgatttcgttcgatgcaagcaatcaaatccagcgactttgcatttcggacagcgacttccttgcgccaataattcaatcgcgagacgcgaagcttcgtttgattcagagatcggacggctgaggtgcctcgatggggtggagggcgcggatcttgatgtcgtaacgcggcggcggcggccaggaccaccgcggcgagcgggcggcgcggtcgtcgtaggcgaagccgacgtgggcgccgcacttgcggcagaggaggcgcgtccgccgcgtgaagaggcggtgcgcgcgcacgtccacgcaccggaactcgttcacgtgcccgaacctcgcgtcgtcgatggcgccgaaccttaccaccccccgc

SEQ ID NO: 40744 - DNA, 542 bp, Oryza sativa
  unsure (1)..(542): unsure at all n locations
  Clone ID: uC-osroM202030h08a1
gtcttcaaggcatttattgatttagtgaattccttgtaagattttctggtaggcatcataaatgtttgttcgccaattatcgcttgattctacaataagactttttacaagggtttcaatttttgctttgttatcttctaaatgaaatcttttacgcaaattctttaggagagaatcaccatttaaacagggcaaaaattggccacccattataggtaacgtcagggtcatttgtactaatgttaatatctttcggtaatgttttctaattgcgaaaaaaccttgaacacataattcttcatattttgcaaataacttggacttttctcctcctaatacatcaataatttcttctgtgagtttgaaaggagccttttcaaactcaacagttcttgacaataaatatccaaaatctatatgtaacaaattgccataagaatctatcattatattaccattgngtctaaataagtcaatagggttaataattaaaaatacatacctgcttttatctgtaaaaaataacatacttatgagtaagc

SEQ ID NO: 40745 - DNA, 289 bp, Oryza sativa
  Clone ID: uC-osroM202030h09a1
aaacattagactgcttgccattttaatatatccaacattaacaagggcggtagtagaatcattagtacacatggttctacctcactctgtattttggcttttttttttctaacacattttaaatgatgggcctgaaacttaacagaagctgttttactactacaagggatgcagcaccccataggtcaaaatgttccccctttttttttcagtttttataccccgggaagaaacaggctcggcctaaagtccgaaaactccagggtttttcactagacagcagcagcag

SEQ ID NO: 40746 - DNA, 429 bp, Oryza sativa
  Clone ID: uC-osroM202030h09b1
ttttaacccaccgtttctctctcaaaaccgggggaatcaatcaatcgccgttcgcgtcgcgccacgagatattttcccccaagaaaagttggagtgagggatgagtgctatggcgatgtcgtcgctgaacccgaacgcggcgccgttcatcccggcggcgttcaggagggtggaggacttttcgccggagtggtgggagctcgtcaagaccacggcgtggttccgcgaccactggttcaggcagcaccagatgtacgaggacgctgcggcggaggaggaccaccaccgccaggtgttcgacgacgacctcgccgcgctcctgcccgacgactcgctcgacctcctagacatggtcgacaccgacgaccttttttacacccccgacccccccgttcaccacatgccgacgacgactcccaccctcgacgc

SEQ ID NO: 40747 - DNA, 562 bp, Oryza sativa
  Clone ID: uC-osroM202030h10a1
caagtaaacatggctatttttattcaagctgagctgaccctaacctgggcctcgctctccagtctcctaatttctagtttttaatctcctttctttctttttgccacgcaattgtactaatacctaccagaatgattgagcacaaagcataattacatacattgaaacattcatcattttgttcacttcaagtcagaataggccacattgtttgacatgacatgagcgccggtagttggttcctctatctctgtacacatgtgttgtattgttgtatgctgtcaggagtcaagtagatggtgcccaacgttgcgatcatcagtgcagtaggcagcagtagtaagtttgttaatccccaaggacaggaactattgcggatttcagttcaatgtgcgaaacacgaactgcaccgatcagtcgttctgggagctcctcatatgtatttccctggacaagaaaagccatgtcaacaactagtgtcgtgatcacaccacacactagccccaagactccatttgcaaccgtagatgaaccgatgtccacatctatttctaaataattg

SEQ ID NO: 40748 - DNA, 395 bp, Oryza sativa
  unsure (1)..(395): unsure at all n locations
  Clone ID: uC-osroM202030h11a1
ccaccagaaaccaagcacacgcttattacaattttaattaacaaaaagaccattgttctgatataggtcacattgttttttttacatacagaaagtttattggattaggaggaacacaatgacacagatgcgcacaagacctatctggctacatgcctagattagggaagggtaaaaccaagagttaaacaaacagtcctgaaattacagtcatcattactggctttaggcccaacttccaccaacccttgaataagtttggctggaaccaatccaggggtaaggtaatggttcttagatcaattttaagaggtttaaaaatatgacacacgggggggggccaaaggacggnggccttattggccgccgaaaagcgccccacacggggatccctt

SEQ ID NO: 40749 - DNA, 380 bp, Oryza sativa
  Clone ID: uC-osroM202030h12a1
caagacggtaacaacgacaaatttcaataccattgcattgtccagaaaggatctggatatgtctagcttgccaatttacagtttaatcttgctatttatcttcaggtaaaaacagaacgaagaaaaaaaagcaacagatggtcatataattgacaccgacggtgccagaacactgaaatgcatggtatgcaaccctataattctaggtatcacaggtttatatcaaacagaattaacacgcaactgaacatgcgatgtccattgcaatcactgtacatcaagtcacgcagaaggttgttcagcctggggagcagttgagctgctaccgttcttccgggacatactgaaaggcctcgccacagtcttgcccatgaatttcc

SEQ ID NO: 40750 - DNA, 338 bp, Oryza sativa
  Clone ID: uC-osroM202031a02b1
aagggtaacctaaggatcacaattatcaaaactagggtagcacaccagcgttgttgagttatgacaacagccaaacatgttgtgaaatataatcctattcccaacaaaaataagaaataaatagaacagctgattgactgactactccagttactaacacaatcagactcaataaggaacaatagattatcttaaattttctctcaagctttttttgcggatagtgctaaaactagaaaagacaatctccaaccccttctcctaacttggcatcaggcttcttttccattagatgatgcccctcgtcttcatgagattttatcacctcttcggaactg

SEQ ID NO: 40751 - DNA, 482 bp, Oryza sativa
  Clone ID: uC-osroM202031a03b1
gtttcgtctcctggaaacaccccacccgcttctcgtctcctcgtctcctcgttcgtctctcgcctcgtcttccccgtcctccgcgcgattccccaaccctccccgaagccgcagtccaccgcaagtcgcctgcctcctccgccccgcgccccctccccccgtgcgccggcgatcgccggtgcccgccaggttatttcttgtggcatggcaaggatacatattggtcttggcttgttctttcatgaatgatgtccttccgttcgaaggacagaaatgtgcaaccacgatttaattggccatggagaagcgaatcaccattatcagcacaactgctcattgatattccacctgaaatagagttatcggactacagaaggttgccagggtcaagaagggagagcccatgtggacttctccatggtgaaggcttcaaggacgaaccaattgctgacttgatattttctttgaaggctttatgaata

SEQ ID NO: 40752 - DNA, 489 bp, Oryza sativa
  unsure (1)..(489): unsure at all n locations
  Clone ID: uC-osroM202031a05b1
atttttctgacagcgagattattccatcttctcgcgccaaatcaaatcaaacttcagtactaggttcgatcggttggaaatcaatggagaccgccacgtncaagcctcattttgtgctcgtcccatggataggtagcatcagccacatcctccccatgactgacatcggctgcctcctcgcctcgcacggagcgccggtgaccatcatcacgacgccggtgaactcgccactcgtccagagccgcgtggaccgtgccacgccacacggcgcggggatcacggtgaccacgatcccgttcccggccgccgaggccggcctgccggagggctgcgagaggctggacctgatcccgtctccggccatggtgcctggcttcttccgcgccagcanagggttcgangaggccgtggcgcggcactgccgtccgcaggatgctcgttcccgccgccggncgagctgcatcatcgcggngatgtgccacacgtggg

SEQ ID NO: 40753 - DNA, 377 bp, Oryza sativa
  Clone ID: uC-osroM202031a06b1
gctttttgtgagcgggcgacctttccatttttttgcgccaaatcaacacaaacttctgaactatggctgcccaggttggaaatcaatggagaccgtcacgtccatgcctcattttgcgctcgtcctatggataggtagcatcagccacatcctccccatgactgacatcggctgcctcctcgtctcgcacggagcgccggtgaccatcatcacgacgccggagaactcgccactcgtccagagccgcgtggaccgtgccacgccacacggcgcggggatcacggtgaccacgatcccgttcccggacgcctaggccggtctgccggagggctgcgagaggctggacctgatcccgtctacggtcatggtgcctggct

SEQ ID NO: 40754 - DNA, 451 bp, Oryza sativa
  Clone ID: uC-osroM202031a11b1
tttgcattgggagagggggagatgagcggcccaatgcaacgctcgtcgcagccacagtttatctctagcgtcgagcggaacaatcaatcgaatggtcctggcactcctcttattgacagcatagatgttgatcagattgttattccagagaaaaatagttggaagaacctattttcatacatagggcccggatttcttgtctctattgcgtatattgatcctggaaattttgagacagacctacaggctggagcacagtacaaatatgagcttctttggatcatacttattgcgtcatgtgctgctcttataattcaatcacttgcagctaggctaggaagtcgtgactgggaagcacctggccgagcattgcagagctgaatatccaaaggctacaaatttcatattatggattcttgcggaactagctggagttgcatgcgacattcct

SEQ ID NO: 40755 - DNA, 438 bp, Oryza sativa
  unsure (1)..(438): unsure at all n locations
  Clone ID: uC-osroM202031a12b1
ggtcagaaaacaatcttcactaaaacatggctacccaataagcgtttaacaactgtccatagctgctcttaggcacgaaacaatctacctgcccaaggtttgcccagcaaaaagatttcaatagttgaaatgggtaaacgaccgcctaaagctctctttcagtgaaataaacacaggtgttcgaaaataagtgttgagatcactgaagatgaagtgccttttcactggaacataatgaccatgagcatattccaccgagggaattgaaccacactagcacacctttcgttttgcatctaattgttaagtttgcaactgttcccacatttgctatccagctcgcctaatggggtcttggaagtattggagagagatgagaagtgctttctgaaaacgttgcttttgcaaataggaacanaccctgaaaaaatgaacttt

SEQ ID NO: 40756 - DNA, 464 bp, Oryza sativa
  Clone ID: uC-osroM202031b02b1
ggaaatctgtataaaatatggtcccatttaattcaatggcgcaagcaggaagtatcccccctcatggctgagtcccagccaacaaaaataaagtatgtccaccccaaaaaaatcgccccagttacaacaaatgattcgattattgtaaaagacacaatagtaccaccacggcaacatttaagctaggataacttggtttaaacttttgtctaccaaaaccaactaccgatagtgtaagcagctggaacgttattatctccactcgagcaaatgataactccgcatattaacctccaactgaagaccttatattccaatctgcttctcgaacttctggatttgattcaagaatatccatgtcatcatcacatggggagcaatcctgacacagtacacagggaagccagtgtagaacttgaatgggccaccgctcttgaaggtcttcatggcacagtccaaagaac

SEQ ID NO: 40757 - DNA, 530 bp, Oryza sativa
  Clone ID: uC-osroM202031b03b1
cttttgatattttctctccccctgctcccgtcgccatcgcaaaggagaaaaaaaaaagaggaggaaggaaggaaggatgagcgccacggcggtgtcgtcgctgaacccggacgcgccgctcttcatcccggcggcgttccggcaggtggaggacttctcgccgcagtggtgggacctcgtcaagaccaccgcctggttccgcgaccactggttccacgagcaccagcagctcgacgagatggccgactccctcgccctccacgacgccgccgccgacgacgacgacctcgccggcctcctccccgacgacgccttcgacgacgacgacgacgacgacctcttcttcgaccagacccataacctcctcgtcgatcccccgcagccgcccgccgctctcaagactgatgcggtgctcaaggcgctgagcctggtgtctcccaagggcggcgacgcgccgcgggggctccgggagaagccccggcactccgagaagcccaccaagtacgccggcagcccgaggagcggcggcg

SEQ ID NO: 40758 - DNA, 448 bp, Oryza sativa
  Clone ID: uC-osroM202031b04b1
ggcaatgattcagagttccatacacagcggaattagacggcgacgatattacaacgggtttatgtccagatcagataaacgccgatgctctctgcaccccacttacacttcatagaggctatgaaaaacagcacgggatttttatacagtttacggcaaaaaggaaggctactagcttactgctactggtggtcgttcgcttcggtttttacttcctactgaagaggttgcgcagcttgcctcgctcaagcttctcgagcagcttcttggcgccggcgacgtccatctcggagagcttcttgaggtagccaatggcgccgtgcgagatcatcagcttcttgcagcgcttgctcgccgacagcgtgaggaggcaggagatggcgtacttcttggccgtgttctgggggctcggctccagcagctgcaccaggttggggacgctcttctc

SEQ ID NO: 40759 - DNA, 484 bp, Oryza sativa
  unsure (1)..(484): unsure at all n locations
  Clone ID: uC-osroM202031b05b1
accttctcctccggctcttcttcagtatcgaatcctctcttctcctcgtgcccaccaccaccaccgtagcaatggcgggcaacgggccgatcaacaaggaggacccgctcaactggggcgcggcggcggccgagatggccggcagccacctcgacgaggtgaagcgcatggtggcgcagttccgcgagccgctggtcaagatccagggcgccaccctccgcgtcggccaggtggccgccgtcgcccaggccaaggacgccgccggcgtcgccgtcgagctcgacgaggaggcccgcccccgcgtcaaggccagcagcgagtggatcctcaactgcatcgcccacggcggcgacatctacggcgtcaccaccggcttcggcggcaccttccaccgncgcaccaaggacggncccgccctccaagtcgagctcctcaggcatctcaacgccggaatcttcggcactggctccgatggccacacgct

SEQ ID NO: 40760 - DNA, 531 bp, Oryza sativa
  unsure (1)..(531): unsure at all n locations
  Clone ID: uC-osroM202031b07b1
tgtgggcagcatgtcgtcaccgcatccgccgccgacgtggccatcctcatccatgacgccgctgcggtcgccgccgccggtggccggagctcgggctccgcggctgcggcggcgctttccacgatccggcttcacaaggatggcgtcacggcgctcgccgtcgcgccgggctccggcgcgtcgctggcgtccggctccatcgatcactccgtcaagttctgttctttcccagagggggtgttccagagcaatatcgcccggttcaccctgccgatccggtcactggccttcaacaagaaggggactctgctggcggcggccggagacgacgacggcatcaagttgattgccaccatcgacaacaccatctccaaagtgctcaagggccacaagggatcggtaaccgggttgtctttcgatcccagaaacgattatttggcatcaattgacaccttcggcacagtcatcttctgggatctctgcacggngactgaagccccgagtctggagcggattgcgccgacatttggt

SEQ ID NO: 40761 - DNA, 483 bp, Oryza sativa
  unsure (1)..(483): unsure at all n locations
  Clone ID: uC-osroM202031b10b1
ttggtcgcttgcttgtgctttgctttgctaggacgagaagaaaagaaaagcggcgagagctaagcgaggaaggatgcgtggggcgtcggcattggcatctctcgtcgccgcggcggcggtggcgctgctcctcctcatcgacggctgcggcggcgccatgtacaaggttggcgacctcgacgcctggggcatcccgccgccgtccaagcccgacgtctactcgcgctgggccaaatccatccacttcgcgctcggcgactccatctggtttctgtacccgccgagccaggactcggtggtgcaggtgacgccggtggcgttcgccgcctgccaggcgtcggacccggtgctgaagctcgacgacggcaactccgtcttcaacctcaccacgcccggccgcgtctactacatcagcgccgcgctgggacactngccggagggccagaggctggccgtcgacgtgcccatggccaacggcaccta

SEQ ID NO: 40762 - DNA, 211 bp, Oryza sativa
  Clone ID: uC-osroM202031b12b1
ttatgtggtggttttttatgcttggatgctgtttgtatgggtgcttaaccttgcaccacgacggcggcggcaagaggaagaaaggcggcggcggcgggaagaaggcgaagaagaaggtggcggcggcggtgagccataagcagcggaagctgtagagccggctgtcgttctacgacctgtctagcggagggatggtgtcgccggaggacct

SEQ ID NO: 40763 - DNA, 95 bp, Oryza sativa
  Clone ID: uC-osroM202031c01b1
aattggttgtggaagggattatcattgctgccatactgtttcaaattttcagggatagctacaaaccttcaaaaaaatcatttactttaagggaa

SEQ ID NO: 40764 - DNA, 488 bp, Oryza sativa
  unsure (1)..(488): unsure at all n locations
  Clone ID: uC-osroM202031c03b1
gttacacacacttgaagaaaaaaaacacgacgaacacgttaaaaaaaggtcgaagagaagtgggagacccaaaccgcgaacaatgtgtggaggcgccatcctcgccgagttcatcccggcgccgtcgcgcgccgcggcggcgaccaagcgggtgaccgccagccacctgtggccggccggctccaagaacgccgcccgcggcaagagcaagagcaagaggcagcagaggagcttggccgacgtcgacgacttcgaggccgccttcgagcagttcgacgatgactccgacttcgacgacgcggaggaagatgacgaaggacacttcatgttcgcgtccaaatgtcgtgtctgcgacaggcgcgcccacgccgtggtaacacgagagccaccgtcgtgtcaccgcacgcgacagcacccgacgatgtcccgncgcgcggtctgaaacgagtattgtagaccctgctgagaccgttctaccttttttacca

SEQ ID NO: 40765 - DNA, 437 bp, Oryza sativa
  Clone ID: uC-osroM202031c04b1
ctaggaagaggcagcgccggccgagtagtggagaagcaacccatcgcaccgtcgccggcggcggtgcggcggcgagcacccatggaggtgaccctccgccggttcgagctctccgacgtggacgccatgatggcgtgggcgtcggacccggcggcggccgccttctgccgctgggagccgtaccagtcgacggagcccctgctcgcctacctacgagacaccgtgctaccgtacccgaggttccgcgccatctggctcgccaccggcgctggcgccagcaactgcgactgccgtcccgtggcgaagaagacgatggacactacgggtgacgcgtcccacgtcgagttttggtacgttgtggtccgcgcgcatgtacaaagaccaccgccgtgccactgctgtcgatcagtacctcgtctccgccctcctcgcggtct

SEQ ID NO: 40766 - DNA, 246 bp, Oryza sativa
  Clone ID: uC-osroM202031d02b1
ctaaccgaccaggcggtcttattccccgagagaagaagaccgtagcggttaactagcgtattctttcggcgctgtgtgaatataagcatgctgcatatcatgtttatgttttccaaggcctgagatggcgcccgtctattttagctaggcaagaatatctcggaccattctctgttcgaattctcgtactgataagtgaacttctgctcccatataaaaatatcattggtcgtattgttttctagc

SEQ ID NO: 40767 - DNA, 438 bp, Oryza sativa
  Clone ID: uC-osroM202031d04b1
ggctcaaataaacacatgctgattaattattgaaaaccaaaccaacattattacaatatgcataatacctcacccacatcacacttactacatcacaggctgtattacttaattttacatcttagcttagcttagctagaactgagctagctagctaacttagctttagctcagctcaagaggaactgaggttgtttctgcgtagccttctctcctctgagagcttcttggcaaagcgagcgagtgcctcctcgttggtgccctctccatcaacgggctcgtatactccggtgtcgatgttcaccctcgccactcgcttagtcagaaggtccttgccgatcttgatcagtgcctccatgttctccttcgtcgcgatgtccaccgacgacgtgtgcccctccagcgaatcgtcctgaatacggaggtagctcttctcgc

SEQ ID NO: 40768 - DNA, 213 bp, Oryza sativa
  Clone ID: uC-osroM202031d08b1
ctaatgacgaggtgtgttcgcatacgccgagagaagaagaccgtagcttttaactagcgtatttatccggcgatgtgtgtatatatgcatgctacataacatgtttatgttttccaaggcctgagatggcgcccgtctattttagcttggcaagaatatctcggaccagtctctgttcgaattctcgtactgataagtgaacttctgataaca

SEQ ID NO: 40769 - DNA, 406 bp, Oryza sativa
  unsure (1)..(406): unsure at all n locations
  Clone ID: uC-osroM202031e02b1
ctgtcttgctaatggcggcggcggcggcggacttcgcggcgagcaagcgggccatggcctacgcgctctgcaagaacctcagcctcgatccgaatacaatatccagtacaagtattgaagagagtgatattgccaccctgttctcacatattgtgaaatcgagtgaagatgaggtactgaaatgggttgaattttccagcaattttgttggaaaatgtggagaacagcatgtattgcttggtaatctgaatcaagacttgtcccagaaatcagttctgttgggtaatggttttaaaccatcagttgctgatattgttgtgtttgcaaccatacangtttttgtgagtcatcttggtgaaaacgagttgcagaaatatccacatgtattgcggtggatggactatat

SEQ ID NO: 40770 - DNA, 528 bp, Oryza sativa
  Clone ID: uC-osroM202031e04b1
gttgtggggatggacgggagcatctcgccatcgcaggcgagccgcggcggcgaggaggccgccggcaacggcaaggatggagaagctctgggaggaggtgacaaggctctgccgttcgagttcagggcgctcgaggtgtgcctcgagttcgcctgcaagtctctcgaacatgagacttgcacattggagaaagaggcatacccagctttagatgaactcacctccaaagtcagcaccctcaatcttgagcgtgtgaggcaaatcaagagccgactcgtcgcaatatctggcaaagttcaaaaggtcagggatgaactggaacacttgctggatgacgacatggacatggcagcattgcacctaacggagaagctcgcttaccagtcatcaagattcgacatcgataaagaagcaagcgagctcgaagatcacagcagcagggatgaagaaggagtccagggaggcggcggcggcgacggcgacgacgagacgatcgccggcggcggcagcttcagccccaacaccgac

SEQ ID NO: 40771 - DNA, 456 bp, Oryza sativa
  Clone ID: uC-osroM202031e06b1
tttaaagacctctaaccttacaccgacctgtatgagaaatcaggtctcatgactgctatccaaattccatataggaccaaggctgcaaaagcagaaggtgctaatccaaggtttgaaatgccaatgtttgtgattatgggtcagaaagactacatcctcaagtttccagcactgaaggaatatatgtcaagcgaaaaactgaaagaaattgctccagactccgggatcacttacatcccagaaggatcccattttgttcaggagcaattccctgacctggtgaatcagcttgtgatagacttcgtcagtaaacatgcatgagatagcaacaaaaacaaggtgcaatttgacaaatccccagactgcaaaaggtaacagttgagcactgcgttcactgatgtgcaccactaaagagttgacgttgtaacgtcgtggtcatgatggtatcgcaaacta

SEQ ID NO: 40772 - DNA, 470 bp, Oryza sativa
  unsure (1)..(470): unsure at all n locations
  Clone ID: uC-osroM202031e09b1
ttcacgcgtccgggtgcggatgtcgactgtttccttggcactgaatgcccacctgttcgtgtcaagggaattggaggacttcctggtggcaaggttaagctctctggttccatcagcagtcagtacttgagtgccttgctgatggctgctcctttggcccttggggatgtggagatcgaaatcattgacaaactaatctccattccttacgttgaaatgacattgagattgatggagcgttttggtgtgaaggcagagcattctgatagttgggacagattctatattaagggagggcagaagtacaaatctcctggaaatgcctatgttgaaggtgatgcctcaagcgcgagctatttcttggctggtgctgcaatcactggaggcactgtgacagttcaagggtgtggtacgaccagttngcagggtgatgtcaaatttgctgaggtacttgagatgatgggagcaaa

SEQ ID NO: 40773 - DNA, 418 bp, Oryza sativa
  unsure (1)..(418): unsure at all n locations
  Clone ID: uC-osroM202031e11b1
tttaatccatccatcgatcgagaattcctcttctccctcttcttgttcttcttctcctctctgaatttaacaagaaatcaagaactaggtgtttgttttgactaacaagaactcggtcgaacactctgcgtgcgtgtttgtttgtgtgtgtcatgtgctctgggccgcgcaagccgtccacaccgccgctgccgcagcagcagaaggaggcgacggtgatggcggcgtccttgcttcttgagctggcggcagcggacgacgtggcggcggtgaggagggtcgtggaggaaggagaaggtgtctcttggcgtggctgggttgtggtatgggccttcngcgagcggcgtggcgaggctcgggatggagcggaggacggcggcgatggtggcggcgctttaccggagcacgggggtgcttg

SEQ ID NO: 40774 - DNA, 523 bp, Oryza sativa
  unsure (1)..(523): unsure at all n locations
  Clone ID: uC-osroM202031f07b1
tgtttcctcttccccccagccatcggcgacgcgaggacgcgacgcgccccaccaaccaccaccgcctccgccgacctcgccgccatgctgtccgcgcgcgccgccgccaccgccgccgccgccgccgcctccccgctgtggaagcgcggcgagggtggcagcagcgggagcgggagcggatgcacgagctgcagggaggtgcggaggagggccgcggcggtgagggtccgtgcggcggcgccgaggagggtggaggcggtcgcgatggagtccgcggcggagaccgagaagaaggaggaggttgcggcggccggcggcggggttgaggacatggctaccgaggaggtgcccgtcacgccatgggccttctccgtcgcgagtggttacacccttttgagggatccacatcacaacaagggccttgcctttagtgagaaggagcgggatgctcattacttacgtggccttcttcctncggcagttgtgtctcaggatcttcaagtgaagaagatcatgcataatc

SEQ ID NO: 40775 - DNA, 505 bp, Oryza sativa
  Clone ID: uC-osroM202031f08b1
ttttttttttttttatttatttttttttttttattattttttttatttattatataaaattataatttttatatatttatatttaaaaaaaataaattaaaataacatactaaaaaacaacaaacaaacaacagaaccaaaatacaaaaacaaataaaaaaacaaaaacaaaaacccaaaaaaaagaaaaaaaaaaaaaaaaaaacaaaaagaaagaagagagaaaaaaaagaagagacacaacaaaagaacaacaaaaagaaaagtgaaaaaaagaggaaacaaaaatatggcagaaatgaaaagacaaaaaaaagaacgaaaaaacaacaaaaaaaaaaagaataaaaaaaataaaacgaaaaaaagaacaacaaaaaaaaccacaaaaaaaaaaaagaaaaaataaaaaaaaaaacaaaacgataaacagaacaaacacaaaaacaagcaaaaaaaaaagaaaaaaataacaaataaaaaaagaataaagaaaagccacacg

SEQ ID NO: 40776 - DNA, 508 bp, Oryza sativa
  Clone ID: uC-osroM202031f10b1
gctaacctcctctcttcttcttcttcttcttcttcttcttcttcttcttcttcttcttcttcttcttctaggctagcactgcacgtgcccaactaacacatacattcatcatatatacacctcctcctccttcttcctctaagttgtgtgtgcatatataatctactagtagagagcagggctaggctagcaattgcaatggcgcctccctatgaaaccagcgccgccggctctgaatcgccggtgccggtggtaacggtggatgtggcggcggcgagcgaccttatcacctcggccggccaccgttacgtcgacgtcaggacagaggaggaaatgaacaagggccatctacacaactccctcaacgtgcccttcatgttcgtcacgccgcaagggagggaaaagaatcctctgtttgtggagcagttctccgcgctggtgaagcaagaggaacatggtgttgtggggtgccaaagcgggaagaaggtcgagctagcatgcgttgatc

SEQ ID NO: 40777 - DNA, 496 bp, Oryza sativa
  unsure (1)..(496): unsure at all n locations
  Clone ID: uC-osroM202031g01b1
cgcgctcttcccgccgccggcgccgccgcagtctcctcaaggctgctcccatcctctccttcgagttagcttcctccttattcaaccatgggtaaggagaagacgcacatcaacattgtggtcattggccacgtcgactccggcaagtcgaccaccacgggccatctgatctacaagcttggaggtatcgacaagcgtgtgattgagaggttcgagaaggaagccgctgagatgaacaagaggtccttcaagtacgcgtgggtgcttgacaagctcaaggccgagcgtgagagaggtatcaccatcgatatcgccctgtggaagttcgagaccaccaagtactactgcacggtcatcgatgcccctggtcaccgtgacttcatcaagaacatgatcacgggtacctnccaggctgactgtgccgtgctcatcattgactccaccactggtggttttgaggctggtatcttcaaagatggcccgacccgtgagcacg

SEQ ID NO: 40778 - DNA, 508 bp, Oryza sativa
  unsure (1)..(508): unsure at all n locations
  Clone ID: uC-osroM202031g02b1
ttttgttgaagaggagctgtatggacggacgtctcacgagggtctttttcaactagtgtttagtagtttggagtagtgtgggcgcttgctgttgagatgttcagatggcatcttctctcattctttctttgtccttttttcccttgcatcgccatcaaggcatcgcccatgctgtggatgcatttgacagaaaaaatgacgattccatcttacataacactgtgaaaaccgaatattcatgattgagaatccacattatcgatcaagacaacttgtgggaatcgagatcgaatttgtgaccatttgcatgacatttttggatccttgattatcatgccaaattgtttctggttacatacacanaattttctcagaacatgcatgccaatgtatcatactgatcgaattcttcagagctgagctaacctcaagttgcatatgacttcagatcaccaaattcacctgcggcgggttcgtgatggggcttccgttcaaccacgcgttggcg

SEQ ID NO: 40779 - DNA, 491 bp, Oryza sativa
  Clone ID: uC-osroM202031g04b1
gttgatggaggaggaagaaaccctcgcggcggaggaggaagaaggaagaagaaggcgaggcgatgccgcgggaggggacgcggatggcggggctgtgggagcgcgaggtcggctgcctcccgcccaagctcttcgccaactccgtcatggcctcccaggactttgtgcggtctctcggtgtccagaagaggctgcggaagcacaggggctgtgtgaataccatcagctttaacgaggatgggagcttgatcctgtccggttcggacgatcgggccgctgtactgcggaattggcaagaggggacgcctaccttcgcgttccacactggccacagcgacaatgtgttccatgctctgttcatgcccttctcaggtgaccggagcatcatcacatgcgctgctgatggacaggtgaggcattcgcaaatacaagaaggtggtcctgtaattacaaatgagctagttgatacagaggtagcagtgcacaaacta

SEQ ID NO: 40780 - DNA, 369 bp, Oryza sativa
  Clone ID: uC-osroM202031g05b1
aaggctggcccgcgtgcgggcaccgccccggatttcgcggcgcgccccacgcgcgtgtctctagctgactagtaggactgcgtgaggcgagtgaatggcttcgttgtcgggtactcaaggaccgtcgcgtctgagggcatggctgctttgcaccgtggattcaacatatcctgggtggtgctgcactcttatccttgcttgttctcacctgtgtatgatgctccagggccaggcgctttagttggcaacctttaagatcacttgcttgccagcttgttacttggctggggtggtaccattgttgctgggctgccttcatagacaacggacactgttcttgggtggatgataatgacatccggtgaggct

SEQ ID NO: 40781 - DNA, 525 bp, Oryza sativa
  Clone ID: uC-osroM202031g10b1
atcctacctgactagtactaccactactagctagtagcgagctactctctctggtcatcaagctttgagtggttggagtggtggcagctatggctttttccatctccaagaaggctgcagttgctgcactcttctccttccttgttgtcacctgcgtcgccggcgccaggccggggaacttcagcgcctccgacttcaccgccgatcccaactgggaagtcgccagggccacctggtacggcgctcccaccggcgccggccctgacgacgatggcggtgcttgcgggttcaagaacaccaaccagtacccgttctcgtcgatgacctcctgcggcaacgagcctatcttcaaggacgggaagggctgtggctcatgctaccagataagatgcgtcaaccaccctgcctgctccggcaacccggagacggtgatcatcaccgacatgaactactaccccgtttccaagtaccacttcgacctgagcggcacggcgtttcgcgccatggcccagcccgggcagaacg

SEQ ID NO: 40782 - DNA, 469 bp, Oryza sativa
  Clone ID: uC-osroM202031h06b1
aaaaaagcaagcattgccaaaatgcttttattcatatatagacttacaaagatcacaacaaaggttccaatgataaatatccatgttctctccaccctgggctgctccttacattaaaagaatggagatagctatggacctccttatccaaattaagcgtagcacattgaccataaaatttaacaacagttcctcccaccctacaagcgactcagcagcaagcagcaaccaaatattaccgaaaatttgaagcatttcacatcttagcagcacgcgcgatcttgaaccactcggtgtggaaggagccgggcatgtcgaccctctcgtaggtgtgagccccgaaatagtccctctgtgcctgcaccaggttggcaggcagcctgtccctccggtaggagtcgaagtacgcgagactcgccgacatgcctggggtgctgaccgccattgtgatggcaaggcagaccaccct

SEQ ID NO: 40783 - DNA, 117 bp, Oryza sativa
  Clone ID: uC-osroM202031h10b1
gacttgtagcatgtagcatataagcaactttaaaatttaaaactttcaaagttgcttatatgctgcatgctacacgtctccaaaagaaacctggggcggccgctcgcgctcaagaac

SEQ ID NO: 40784 - DNA, 276 bp, Oryza sativa
  Clone ID: uC-osroM202031h12b1
ttccaaagcactacccgaagtaacaaaccggcgcgtttttgcagatagatcgatcccaccgaccaagtgcaagccgaccacgtaagccagaggggtgtgagacctaaacctcgactgctccgacgcgaagcgcgatgaatctgagctggcattcgatagatgaggtatggtgggagccggagcgagaagcccggttgcatgatcggaacacgactatgtgttggaatcggaatgcgactggatggtgctgaacatcggtgatggtgatagtgatgg

SEQ ID NO: 40785 - DNA, 469 bp, Oryza sativa
  Clone ID: uC-osroM202032a01a1
tttgttttttttttttttttttgttttttttttttttttttttaagcaagacaaggatcggattacattcatccgcgattatgacctcacagcatgggatattttaagatgatttgccacaatggagtaccaaatccatccataccacacgtcattttacgtcaagatccaaggggaaggttccaaagcaaaggaaaaataacagaggcgaaatcccaaaaacccaagattagtctgaatgacaaagccccgagggaaatgctcacacttgaagacctcataaccatatgtaacaaggggaaaactgattgaatcggttcctcatgcctggcattttggtgcattttttggtgaacaaaaagctcacaccaggcggatgctcggatgatttacaacaactgaacccagatcatcccgcaggttactggtgccatcataaacactatgattctccagtctaggactgctt

SEQ ID NO: 40786 - DNA, 266 bp, Oryza sativa
  Clone ID: uC-osroM202032a01b1
gatctttccagctgggctactccggcagcgcggatccggagcccggccggtgccgccggacggacggcaagaaatggcggtgctcgagggatgcggtcgccgaccagaagtactgtgagcgacacatgaaccggggacgccaccgttcaagaaagcatgtggaaggccagcctggccatgccgcgaaagcgatgcccgcggcggtggcagcagccgctgcctctgctacccagcctagggcttcggccgcccacaatggcggagct

SEQ ID NO: 40787 - DNA, 466 bp, Oryza sativa
  Clone ID: uC-osroM202032a02a1
tttggtttacaaataaattctgtgcctcagcaataatcacaacacattgtggcacaaatttggttctagtgtgggtaatactcatggatttgacataacattttacacaacatcactaaaagattatattggccaatggaatcaaacttgttgcctccgcaagaccaccacaacatcttctataactttgcatgatcaaactgtgcaaaccaacattaggatggtctcaattcattcacaggaacagagtatcgtgccttccatttcatccatgtaaaaaaatcaattgcactcctaggactgctatgggaatacgtgtactacatttttctctataaatggtgcatcttgttctagaaattgttacaccatgtccactttgtcagctgtgtgcttcaaaatcttaggtgtcgacactttctctggatttgccgagttcgtttcctggttaacaacaataattagg

SEQ ID NO: 40788 - DNA, 414 bp, Oryza sativa
  Clone ID: uC-osroM202032a03a1
tttggtttttttttttgtgttggttttttttttttttttgttggtttttttgaaaaaataaacaccaaaacaagtatatacctgcaaaaaagggccaaacccaaattaggcccgaggaaaagaattcccggaggggccccggtttaggactggaaaactttcactaaaaaacaaagcctgggtaccctaaactaaaccacctttacctaaaaggaaaaggctaagaatttgggaccctagaccggaaaaagctttttaatctaattttcaaagggaccagcacacggttttttggttaggggaagctgcttagggggcccgaccagggggtggttttggggacccaggatgggccgggggtggaaaaatccgggctgggggggggttccggagggaaaaggggggcattctctc

SEQ ID NO: 40789 - DNA, 405 bp, Oryza sativa
  Clone ID: uC-osroM202032a03b1
ttctttctcctttaattcattatcctttgcatgcccctctccagctagctaagatgagtccgaggattcagcagctggccgctgtgttgttggcggctgttgtcgtcgtcgcagccgcccaggatgaacctgcagcagcaaaaaactaccaaactcaatgggatacagtaatgtcaatacttaactgtaagagtgattcgttaatcccaagctacatctgcagcgtgattagcaaaagtcgctggggttgggcgtcagatgatcccaacgacgacgaccagtacacgccggatcatccgctgccggcgccggggcggggggcggcgggccgtgggtccgcgatgaccaagcttgaacctgaccaagtacgtggacgcgctgtcgcggatagccaagattcggggc

SEQ ID NO: 40790 - DNA, 421 bp, Oryza sativa
  Clone ID: uC-osroM202032a04a1
ttttgttttaaagatatttacattcattgattaacaaggcacacaacatcatacatatgtacatccttatgtagcattgggaagtctgaaatggacatgaaaggatacaacagaacaatgagcaaacttgctaacactacagtagtagtgcagagacatgcatattttattcttgcactccaagttaatttgctcctagctagtagtaactacttctcttgtacttcacatgtaccgatctaatcaggcgtgcgcgctgctaattaaccattcccaaaacactgcgtggttcgctggacacgtcgaagccggcgaggaggctgtccatcacgtcgtcggagcagcactccagcagtatgagctcatcgcctcgctcgccggacgccaccgtcgacgacgtcgtgcaagcggaggctctgtc

SEQ ID NO: 40791 - DNA, 398 bp, Oryza sativa
  Clone ID: uC-osroM202032a04b1
tacattttcaataacttgcaaggataactcaaactacttgaatcagatcagacaaaaacatcataagaatatcacgatgtgtggaggagcactgatcccgaacgactatggcgacaagccgccgccgccgtcgtcggagtcgtcggagtgggacgccacaacgaagatgaagaagaagaagaagcgtggtggcggcggcgacgacgactgggaggccgccttccgggagttcatcgctggcgacgacgacgacgacgacggcggcgtttccatgttcccttctggtgcagggacgatggagacgaccacagaggtggcgcctgcggcggcggtggtgtagaggccgcggcggcggcaaaaggtgaggcggagctacccgtaccgtggcgtccggcagt

SEQ ID NO: 40792 - DNA, 349 bp, Oryza sativa
  Clone ID: uC-osroM202032a05a1
tttttgttcttgcggagtgccgcggtcctaacggtggcctgtgacctattccatagcattttgctcgtcagaccggtatgccggactggaatctctgcctacaaaggcctgagcatatggtgagaggcctcctgggaagctcatgatctggagctcggtagcggttggaacccgtgacggccatctgctagctgcaccccatccaccgagacgtgattggcaggagcgccgccaagctcgccatcatagccgtgatgccggacaacggatgctccactcgacagacggcccctctggtaggatccggccaccacgcctttaactacagcgtacagggcccggcgccctg

SEQ ID NO: 40793 - DNA, 466 bp, Oryza sativa
  Clone ID: uC-osroM202032a05b1
aaatcaactcaaattatgtgatctagtcttgagtttctggcagcgtatctataaacgcattacacagcaagtcatggagttctcttacaaacgagctgctgcataacaacattcagatgaactaaaatgaacgatcgtgggggcaaatcaaacttgacgccattccagcctgcgtatattaatacaaggaaaacagcgtttcaaattaatcccccaacaagcgacaagctgaaacaacagcaaaagattatcttcacctatttcctttcgcttgtatccccccatggcaaagaaaagttgatggcccagaagaacataaaagagtctggcaggcaacaataagctaatcagcaactgaatagctaaagccagtgctgtgatatatctttgatgttactaggaacggagcattttaactttgggcatggacttcttcatctgacgagccctttttttttcctttttt

SEQ ID NO: 40794 - DNA, 160 bp, Oryza sativa
  Clone ID: uC-osroM202032a06a1
ttttggttttttaaatgatcagggtttttaatttcaattttatgggaggggtgaaccaagactgaaatgattactatattaaaaagatgcagatggaggctgttttgatcgtggtacaaaaggccacagcggggacctacaccaatggatgaaggatcag

SEQ ID NO: 40795 - DNA, 346 bp, Oryza sativa
  Clone ID: uC-osroM202032a07a1
ttgttttttttttttttttttgttttttttttttttttttttttttttgggaacaaaaaagtaccattccaagggcttatcgaacaatcaatagaaccacccactacataatttacaaaagctgaacatctatagggggattccatacaacaacttgggaggtcaaattgaatcttggtggttcttaaatgttgaaagagttacagggaaatacaagggaatccaagggcatatttcacatttcttattggtaaccattttagcccatagcatatttttggggccagctccttgggggggactcgtacttggcccgatcagtcttggacatgggagcaatttttgt

SEQ ID NO: 40796 - DNA, 469 bp, Oryza sativa
  Clone ID: uC-osroM202032a08a1
ttgttttgataaaatgtgccttccccaacaatacagaggaaggtgtgcttgtgaactttattgttttgacaagcagattttagcactaacacaaaaaatagaacatatgtgctattagttacacatcaagcactgaaaatacgggagttagattgttctttggcgactgattctgcaagcacacactagactaccacacactagactaccaaccacaaaatctagcagtttacaagaatgccacagcacatttctgaagccatattataggcatagcttcggtagaagcacaagaaaggcacaatttacactgagtcaaccacttcaacctgttgttgtgcaagatatctttcccttcgttctttccatttatcgatgacaagcccttcgccaacaatctttgggccattctcttcaggaggtttgtttcttgcctcaagtgcagtcttagcctaagccaactgattat

SEQ ID NO: 40797 - DNA, 234 bp, Oryza sativa
  Clone ID: uC-osroM202032a08b1
ttagaaaccccttctttttccctcctaccacaccacttcctgatcctgctcccatggcgatctccgggagaggacaggtacgcggaggacggcggtggcggcgactccggcggggggaagctttggaacctctgccgtatgcccttctggcagcccggaggcgcgcccgcaatgggatacgggcctgcaacttctatgttgtactaggcggctgccgggatccaccaccatttc

SEQ ID NO: 40798 - DNA, 390 bp, Oryza sativa
  Clone ID: uC-osroM202032a09a1
ttgttttccacagaagtaaagaaacccgtatatatctggagtactagcgtatagtgcccccccaatcccaaggccaccgaggtgaccgcgcgcgccacgacacacgtacacccctcactgtactccactaagcccacgaggccacgacccacactgtgcgcgcgcgcggtcaaacgacacgtaccatcaatttgtacagttgtactacaaccgcgaccttattgtccgtggcattcttcacaccccggccggcgacgcgtcgacggggacggtgtgcctgggctgtccgccattcgccgacgacctcccgccctggcgcacgctgttctccgcgaaccgcacgctggccgcgttgaaacccttctagcgctcgtgatccgaccactcccg

SEQ ID NO: 40799 - DNA, 452 bp, Oryza sativa
  Clone ID: uC-osroM202032a09b1
gtcgcgtaagatcacgttcgaaatctttattcattttctctccaccggttgccctctcgccgcacccaaccatcgcgccacgccgcgccgcgctgccggagccgcgctttccgctatgctataagagctgacgcgcagggcacagcggatgtacgtacacacagtcactagctaagctgctagccttgctaccacgtgttggagatggaggctaagccggtggcgatggaggtggagggggtcgaggcggcggggggcaagccgcggttcaggatgccggtggactccgacctcaaggcgacggagttctggctcttctccttcgcgaggccacacatggcctcctttccacatggcgtggttctccttcttctgctgcttcgtgtccacgttcgccgcgccgccgctgctgccgctcatccgcgacacccttcggctcacggccacggaca

SEQ ID NO: 40800 - DNA, 429 bp, Oryza sativa
  Clone ID: uC-osroM202032a10a1
ttggtttttaccaaatttgcatatatttatttttcagaacccgcattgtacaacatgtatatttcatcgcagtttattgttccatctttattcattcacaaaagtagatacagccagtgccttggagagttggaggttcgagcatcttggcctacaatgctcttgctaacaattctggcgaatgaaaaccaaaaagagctcaagtgtgcaagtttaaagatacatggcacaatattacagaagttgccgtgacaaagtgatctacgaacgaattatgctcacccgacagaaagaataggaccggactatatataactacagcaaaaaggccacaagttcaaacatttcaatttattcaagctgcacttgagagaaaacatttgatttttctgaacatagatcagtgggtagcatctctgctgtagtctg

SEQ ID NO: 40801 - DNA, 428 bp, Oryza sativa
  Clone ID: uC-osroM202032a10b1
tcgtgttaacatctttcagtcacttgacctagcatggacattgcttcgcatattccctcgtgagcttctccatcgtatccctgcgaagacattggatcagtactacagcagagatgctacccactgatctatgttcagaaaaatcaaatgttttctctcaagtgcagcttgaataaattgaaatgtttgaacttgtggcctttttgctgtagttatatatagtccggtcctattctttctgtcgggtgagcataattcgttcgtagatcactttgtcacggcaacttctgtaatattgtgccatgtatctttaaactttcacacttgagctctttttggttttcattcgccagaattgttagcaagagcattgtaggccaagatgctcgaacctccaactctccaaggcactggcttgatctactttt

SEQ ID NO: 40802 - DNA, 416 bp, Oryza sativa
  unsure (1)..(416): unsure at all n locations
  Clone ID: uC-osroM202032a11a1
ttgtgatgtacggcatgcacctcgtggagctctcggagcggtcgtcggcgatcaccctggtgcagcgcgcccgccgcaacggcatgccgttcttcaactccggcgacaaggccgagcagatggtggtggcgttcgaggcgttccagcagctgagctcggtgcgggtgcgccccatgacggccatctccgacctggacaccatccaccgcgacgtcatcgacagcgccaccgccaagcgcgccgccatcgtcgtcatgccgtaccacaagatgctccagcacgacggcacgttccagtccctcggctccgcgtaccacgccatcaacaagcgcgtnctccgcgaggcgccctggttcgtcgacgtcctcgtcgaccgcggcctcggtggccacgcccaggtgtacgacaagaacgtg

SEQ ID NO: 40803 - DNA, 502 bp, Oryza sativa
  Clone ID: uC-osroM202032a11b1
cagtcgtattagcaatcaaatttataaaagtttgacagcaatactttgaaaaacaagtcaaaaaggaacagggataacgcaaaaagcagctagcagcatgattaattcgacgaaggctgcacactgcgtacaagaaaaacgactgatgttattatatacacttcatcagtataacactccacacacacaacaaacatatatcgctaccattttctgtgaatcatcaaacatgaactactactggtagtataataatactggtagtataataattctggccggcgacgagcaaattaaagtcatacaatgtcgtggttcatcggtgaatgcgccaccgggacaacggcggcgccggtgagctcgtcgagggcgtcctcctccgtcgcggcgggtggcctcgccttggggtcgtacctcttgctcgccgggttcgccgccgggtcgtacctcttgacgaccagcaccgacgccgcggtcctgaactccggcgacgccaggtagc

SEQ ID NO: 40804 - DNA, 395 bp, Oryza sativa
  unsure (1)..(395): unsure at all n locations
  Clone ID: uC-osroM202032a12a1
tttgttttagggagaaatacaagtttttattcagaattaatggaagtgatgaatcaatcctagataataataataataaaaagataatcaaacaagctcctctgatcgtggcacaaatgggagcagcagtagcataaaccaatggaggaagaacagctcaaatccgtaacgaattcctacacgcacgcgtgccatgctcacatcacatncaaatcctcaaatgcgtgcaccgatcaagattgatacagacggtgataggcttgccgggttcgtcgtcgacgtcgagctcacacggcggagacggcgtagacggcggcgacgacgatgccggcgaggatccccaccggcgagacacggagcggcgcgacgccggagcccacgggcgtngccggcgt

SEQ ID NO: 40805 - DNA, 474 bp, Oryza sativa
  Clone ID: uC-osroM202032b01a1
ggcgcaggtgaaggtgctcgtcgggtcgtcgtaggcgtagctgtaggagcgcgggcacgccgacttgaagacctgggagtaggcggtggggcggcaggtgttcgggttggcgtacgcgccgctgcagcagaactcgggcttgccgaacgcgtcgcacgcgctccggcacgccgcgccgaccacggcgcggagcttggccgggcaccgagcgttcaggtcggtcgcgcacccggcggccgcgcacgtcgttgccgtcgcgccgagggcgcccgagggctccaccagcaacggcaggttgtacccgtccacgaggctgacgtcgtagaagttgttgcggtcgccgccgtcgagcgtgaactccgccagcgtggccgggggcgccgcgccgaggtcggcgcactccagcgtgcccgagccgtagtcgcccgtcgcgcacacgaccttcccggtgccgtcctgcatgcagcccgtgcg

SEQ ID NO: 40806 - DNA, 467 bp, Oryza sativa
  Clone ID: uC-osroM202032b02a1
tttggttttttttttttttttgaggaaattgttcccttccaacaaaaaaagttaataatctacagccataataccaggatggatcatgttatcgtttcagtatcagccatccaacaaacatagcctacagaatcaatgtattcatgagaatatcaacagcgtcagctgcaagtacatctatctataaagcaccataaatagcagcaaactattacaaaactgctaccatacgaaaactatgttagatggcatagtaaataacaagatgttaaacaactccaaagtgaaaaccacgtcaaaacgagtatgaaactgctgcagcagcacgaccaatgagtgagttgggcaggctttgcctcttgccatgcttccaaccaagtgggctttgcattccatgcacccacagacaggcctcggtgttacagcaacagccaggtgccgcttaatggcaacataatgcaggagac

SEQ ID NO: 40807 - DNA, 406 bp, Oryza sativa
  Clone ID: uC-osroM202032b02b1
ctcgtagacatagcagtgatcgcaagaaatcaaggaagcatacccatgcttcggactctgatagtgaaaatcggcacaaaagacacaaaaaggatcgagatagctcccgcagaaatggcacacgtgatgaccttgaagatggtgaacttggagaagatggggagattcattagtcattcgtttctccgctgagatttatcacaatacagtcccccctcctgttttggacatatgaaatggtgcattttgatggcaactataaatgctttcctccagagaaggacaatttctttatggggattatcttcttgtcttgatctggcttgttggaaatggacaataatagccttcattgtttggatgctcacaatgtagtcatgaaggttcttgtactgcaaaacctttg

SEQ ID NO: 40808 - DNA, 432 bp, Oryza sativa
  Clone ID: uC-osroM202032b03a1
ttgggtttttttttacgggtgggacatgaacatcatgattcattcaggtacaaaaaactgtctcaacgatgcatcaagtatcaaacatgtaaaagactgaaggaatctgccgtcgcaaggaatcatgcaaaagactgaagttcagtgagttgtccacctttatcttcatatgttttagttagctaagctacattgtcagataagattacttgagcatcacgtacgggtgtgacatgaacatcatgattcaggtacaaaaaaaactggctcaacgatgcatcaaaggatcaaacatgtaaaagaccgaaggaatttgccgccgcaaggaatcatgcaaaagactgaagttcagtgagttggccaccttatgttaacacctgccctcttcttatgctattcaccacctgccctgcctcccccttgtatagatcc

SEQ ID NO: 40809 - DNA, 461 bp, Oryza sativa
  Clone ID: uC-osroM202032b04a1
atattgtacacctcagtttctgtatggagaactgcaatttcaatccgtcagagaaagctattcaaaatcctgtctggaagtggaacctgcattttagtgcaaaattcactgtgttttactggatgctgtacagtagctgatgagtgatgacagcagccatggctgactgaagtctctcgttcatgctgcctgcaggatttgcggccctcctcttgcagattcatatgggagcgtgctcagcaccttcacacggaacacggcctttttatctgaaccaaactcaatggcatccgagggatggaaacggacagggaagttcggaggtacgcgatagcgtctaccttcgttgtcggtaatccatgtaccatgttcacttccattatcagtcacataaaagggcttattcttgcatgtgatagtagcatggttttctgatatctggggcaagggcaatgccaggg

SEQ ID NO: 40810 - DNA, 551 bp, Oryza sativa
  Clone ID: uC-osroM202032b04b1
ttatttggcttctaacacaccaattcgtcgaacacttccgatcgtcttctctgtctccgtgtgagtattgacctcaggcgccgcgacgtctgcaagagtagtcagattcaggagatgctcgttgggtagagcggatcggagagtcactgtcacagtagcgcttctgctcttgcttctcggatcccaccacccaagaagagctttgctttgctcccgttccactgccagtgccagccatggcgccactcccaagctccagctcaacgcgggccacctctctcgtggcgatcccgggcgcctcctgcccccatggccaggcgcaacgcctgctcgccttccgttccccacgacgcgggtcacagtggcgcgggctttgcgtgtcccgggggcgccaaggtgcgaccgttgccatggcaatgacaggtcgagacgtcgtacctgcaacatgaaacgcgactactatcagtacctcgacactttaagactggagctgagaggaaggatgctgctgagaacaccatggtggcatacaaagccgctcatgatattgc

SEQ ID NO: 40811 - DNA, 380 bp, Oryza sativa
  Clone ID: uC-osroM202032b05a1
aggaccgtttttttttggttttttgggtgcaagccaggtttctattcataattaatggaagtgtttaactaatccgtcatagttttaatattaaaaagatacgaaaacatgactggttttgatcgtggaacaaatgggacaagcggtaccataaaccaatggcgcaagaacagatcaattctgaaacgaattagtacacacaacgcgtgccatgctcacatcagagacaaaacctcaaatgcgggcaccgatgatgaaagcttcagacggtgataggctggacctggtaagcatttacaccgagctgaatctgacgaaattgcgcagaccgcgaataaccaggtgcggactgggatccccaacggggagatacacagtga

SEQ ID NO: 40812 - DNA, 425 bp, Oryza sativa
  Clone ID: uC-osroM202032b06a1
gtcatcaacacaattcaggcatacaggtcctgtttatgaaaagaaaatgtgtaaccttgcttgtctcatcatgttacatacactcaaggctaaaatgcaaattgatctggacaagtagtcacaatggcatggtgccgatcagctgatgaactttgtggccaaagaggcagatgaatccatcgaacagcaggcagaggcacagataacttgagaagttcagagtaaaccccgtcttcttttgtagtcactgacggtcagagttagagcatgcctccttccatcattgtcagggaccttgtaacccatggttgcttcaatcttctgcttcctcgccatgtaaccatcgaagagacccttgggaccgccgaattcttccaggccggccaatgatataccgagctcaaaattatgcagcaaattcgatt

SEQ ID NO: 40813 - DNA, 470 bp, Oryza sativa
  Clone ID: uC-osroM202032b07a1
ttggtttttttattcttaacttctttttttatgaacattatctcgttccaaacctcacctcctacactccctccccacccaccacggggatcagtgatgcgcatcatgcatcggacggtgtataattgtacacgtggaaggtggcctgtggggccaccgcggccaggaagatcctggccgtcgcttcctgcgacaccaaccccgcttgcttctccacgagcgccgccgccaccacgtctccggcggcgccgcccccggcggccaccatccctatgatggccgcctgcacggggcctagtgtcggattatacgccgcggactccaggcatcctccggcgtacaccttcccttcgccggccggcacggggaatcccgacgggcactcgctatacggcgcatgcgccgcccgcgcgggcgccttcgctgcctccctcaggcgcgcctctaggtcaccgtgggcgaagccattg

SEQ ID NO: 40814 - DNA, 436 bp, Oryza sativa
  Clone ID: uC-osroM202032b07b1
tcgttctcctctcatctcctccacactttgaggaaacgtctaagcacaagtgctaaacgcgattagaaggcagcgaaatcgtacactaaattgcacggattagagatagatctcaagcaatgggggaggagaaagtggcgccgaagtctgacgctgccccggcggtggagttgctggggttcgtgatgagcgcggaggaggccgagcgcgccgcggcggcggccggggtggagacggtggaggacctgctgccgctggtcggcccttccgcgatgcggcgcgcgcgtgccccgatctcgcggttccccgtgggcgccgtgggccttggcgcgagcggccgcgtatacgccggagtcaacctcgagttccggggcctcccgctgtcccattcccgtcacgccgagcagttccttgtcgtaaacgcggccgccgcggt

SEQ ID NO: 40815 - DNA, 459 bp, Oryza sativa
  Clone ID: uC-osroM202032b08a1
gaaaagagaacggaacgctctctgtcctctactacacgataattgtccagtaaagtaaacatcatcatcatatcaaggtgaaggccatcagtcatacaatacacacacacataaaaaagggctgtgctgctgctacactcgtgcctacgcattcatctattctcagacaagggcaatctaaaaaaacagatggatgccgtgccgcctcctcttccttggatctggctaactcgcaaagggcaacatctagaacttgaagtctttcttcttcgacttcccgtccttctcctgcttcctcttcctcttgcttgcgttctccgccaccatgtcgctgaaatcttccttctggttccgtagcttctcctcctcccgggcttcctcgtacttggcagccaaaacatcatccataacttcaagctcctcaggttgtatggtgacatccaccttatcagacttctg

SEQ ID NO: 40816 - DNA, 458 bp, Oryza sativa
  Clone ID: uC-osroM202032b09a1
ttgttttttaccaaatttgcatatatttatttttcagaacccgcattgtccaacatgtatatttcatcgcagtttattgttccatctttattcattcacaaaagtagatacagccagtgccttggagagttggaggttcgagcatcttggcctacaatgctcttgctaacaattctggcgaatgaaaaccaaaaagagctcaagtgtgaaagtttaaagatacatggcacaatattacagaagttgccgtgacaaagtgatctacgaacgaattatgctcacccgacagaaagaataggaccggactatatataactacagcaaaaaggccacaagttcaaacatttcaatttattcaagctgcacttgagagaaaacatttgatttttctgaacatagatcagtgggtagcatctctgctgtagtactgatccaatgtcttcgcagggatacgatgg

SEQ ID NO: 40817 - DNA, 492 bp, Oryza sativa
  Clone ID: uC-osroM202032b09b1
tcgtgttaacatctttcagtcacttgacctagcatggacattgcttcgcatattccctcgtgagcttctccatcgtatccctgcgaagacattggatcagtactacagcagagatgctacccactgatctatgttcagaaaaatcaaatgttttctctcaagtgcagcttgaataaattgaaatgtttgaacttgtggcctttttgctgtagttatatatagtccggtcctattctttctgtcgggtgagcataattcgttcgtagatcactttgtcacggcaacttctgtaatattgtgccatgtatctttaaactttcacacttgagctctttttggttttcattcgccagaattgttagcaagagcattgtaggccaagatgctcgaacctccaactttccaaggcactggctgtatctactttgggaatgaataaaggaggaacaataaactgcgatgaaatatacatgttgtacaatgcgggttctg

SEQ ID NO: 40818 - DNA, 484 bp, Oryza sativa
  Clone ID: uC-osroM202032b10a1
agaaaggcgtcttcgtacgtcgcctctctccgcgcctccgcgcttttcctcctcctctcccctctctcccttctccgccgccgtcgcagcatcaacccaatccgccgccatgagggagtgcatctcgatccacatcggccaggccggtatccaggtcgggaacgcgtgctgggagctctactgcctcgagcatggcatccaggctgatggtcagatgcccagtgacaggactgttggtggaggtgatgatgctttcaacaccttcttcagtgagactggtgctgggaagcatgttccccgtgctgtatttgttgatcttgagcctactgtgattgatgaggtgaggactggttgctaccgccagctcttccaccctgagcagctcatcaatggcaaggaggatgcagctaacaactttgcccgtggtcactacaccattggcaaggagattgttgatctgtgccttgaccgcatcaggaagctt

SEQ ID NO: 40819 - DNA, 428 bp, Oryza sativa
  Clone ID: uC-osroM202032b10b1
tttatttttttaaaattttttttttttaaatattataaatgatcatattttaaataataatgacaggtcatataaaaaactacaacaaatggttaaaaaaactaataaaaaaaaaaaaaaaaaccacaaaaaaaaaaagacgaaaaagacacaaaaaaaaaaaacaaaaaaaacgtaaaaaaggaaagtgtgaaatcgcaaaagatcaaaaacaagcacagacaaacagaacatttataaaaaaaaaaacaaccactcataaagaaaacgacatcaagatagaaaaaggaaaaaaaggcataataaaaaaggcctgacaaaaagaaaaaatacaagccctaaaaataaaacctgccaaaaaaaactcaaccataaacaactataaattttctacgaaaaaaaaaaaaaccattggaaaaaccttccac

SEQ ID NO: 40820 - DNA, 362 bp, Oryza sativa
  Clone ID: uC-osroM202032b11a1
tgttttttagggagaaatacaagtttttattcagaactaatggaagtgatgaatcaatcctagataataataataataaaaagataatcaaacaagctcctctgatcgtggcacaaatgggagcagcagtagcataaaccaatggaggaagaacagctcaaatccgtaacgaattcctacacgcacgcgtgccatgctcacatcacatcgaaatcctcaaatgcgtgcaccgatcaagattgatacagacggtgataggcttgccgggttcgtcgtcgacgtcgagctcacacggcggagacggggtagacggcggcgacgacgatgccggcgaggatccccaccggcgagacacggagcgg

SEQ ID NO: 40821 - DNA, 476 bp, Oryza sativa
  Clone ID: uC-osroM202032b12a1
ttggttttagggagaaatacaagtttttattcagaattaatggaagtgatgaatcaatcctagataataataataataaaaagataatcaaacaagctcctctgatcgtggcacaaatgggagcagcagtagcataaaccaatggaggaagaacagctcaaatccgtaacgaattcctacacgcacgcgtgccatgctcacattacatcgaaatcctcaaatgcgtgcaccgatcaagattgatacagacggtgataggcttgccgggttcgtcgtcgacgtcgagctcacacggcggagacggcgtagacggcggcgacgacgatgccggcgaggatccccaccggcgagacacggagcggcgcgacgcctgagcccacgggcgtcgccggcgtcgccttcgaccctgtccccgccggagtcgtcggcgtctgtcccgcaggaggagcagcagcgccactcttgagttgctgacc

SEQ ID NO: 40822 - DNA, 445 bp, Oryza sativa
  Clone ID: uC-osroM202032c01a1
ggaacggtaaaacaggatcttcgttaatgtattcttgagatgataaattatatagagtacaaattggagaagataaataagagtacaaattggatcgagctatgtacacagatcactgtaagataaaaggcaggcagtagagtaaataagctgtcccctcaaaatgcgacaacgatatatggaggcacggaagcagaaatttcagaaaggctccacgctgcctcatcccctctcctcgccgattacatgttatcgatgagctcatgcggtgttcagcttagcgagcgtgcgcttcaaagccttcacgctcaatgggctgttcttgctcgctgagcaggttccagcccgggtgttgcagacagggtaggcaggcgggcaggagctggcatgatccttgcagcaggttgcacctttaactgggcaacagccccaaaccaagcagaga

SEQ ID NO: 40823 - DNA, 93 bp, Oryza sativa
  unsure (1)..(93): unsure at all n locations
  Clone ID: uC-osroM202032c02a1
ttntggtttttattttttatgtttgtgtttttttattttgtttttttaatgtttggttcttggttcacattgttagcaccggtcctacaacaa

SEQ ID NO: 40824 - DNA, 450 bp, Oryza sativa
  Clone ID: uC-osroM202032c03a1
aaaatggaagtaatgttacattaaggatttcattggtttacattccagtacatctgacgagtgcaaaaaggaaagggaacacatcaaaaactcttggctgtgatacatcaaaattgctattgcaggagtataacacagtagagcaatccatttcccgatacaagagaaataaaaaaaccattgccatgttggtgctttgttggggagattgcaaaaacatttttccaagtagctttcatgcaagtgacgctccgtctccatattgctaacaagggagttctgaccatctacttttgtatttcggtgtgtccacaagctagaagttacaacaggcagttaaaatggagcatgcaaaggccattcgctgtgtctaaatctccagtacccaagaaagatggtgaactgaacagcattggggaatataatcaatatatttacacacactaaata

SEQ ID NO: 40825 - DNA, 437 bp, Oryza sativa
  Clone ID: uC-osroM202032c04a1
ttttgttttttttatcttacaaggaacagtttattgtttgagtgtttcgatttaactatgtacaacaaaagttaaattaggatttagaggattgttccaggtttttcgtcattacaaacattttcatagagtctgcggaatcgtccagcattaatattctgtagtccttggaacttattcacactagaagttgttctttcaaagtctgaagatacttgaattcttaggaatttggataatactcgattgtcacgaatgagtcgggcaatacagttttgacctgatagttatttggtgtcaatatcgaaatgttggacttgttgcattgctttatatgatacagcgagtctgtcattacaatgatgcacctagcgcaataagaaagttcctggctctcgatgagatagcatcttttgtgcgtttgtcgtagaaataaa

SEQ ID NO: 40826 - DNA, 465 bp, Oryza sativa
  Clone ID: uC-osroM202032c05a1
tttggtttttttattttttttttttttttttttttttttttttttttttttcttttcaacacgaatgcaagagagcgccccctcttcttttgcaaaagaaaacgaggcattcaacgttctgttcgacgaccacttgtccccaagggcccactccaggacttagctggggctgggcgggggccccaaattgcttgacaaaaatgtttaaacccaaattacacacatgccctttgaaggccccaaatgggttcacaaaaatgcttaaatccaaacaccccccgtggcttgttaaggcacaacacccgggatcatgcaaatgatcaaaccatttcccctcatagggaacaaaaactaatttccttttaccccccaaaaatgggggttatttctgataccccaccgggttattcagactgaaaggagctgcccctcgaacttggtggtgaaattccaaaaattataaac

SEQ ID NO: 40827 - DNA, 389 bp, Oryza sativa
  Clone ID: uC-osroM202032c06a1
tttgtgtttttttttttttttttttttttttttttttttgtttttttttttttttaaatagcaatgcaggaggggttcccctttttatttgaaaaagaaaacgaggcatacaagggacttttttggggccttgggtaccaaaggggccactccaggaataaaattggggcagacggggggcccaaaatggttgaaaccaaagattaaaaccaagggacccaggccggactgtgagcccccaaaagggggcacaaaaatgattaaacccaaactacccacccccttttttaaaggaaaacgacacggtggagggcaatggacaaaccgtgtcccagggtatggaacaaatagcgatttcctttaaccgccccaaaaagggggttattttt

SEQ ID NO: 40828 - DNA, 426 bp, Oryza sativa
  Clone ID: uC-osroM202032c06b1
ttacttccctacatatcgacatcagaaggttcacatatgcagagctgaagctcataactaacaatttccaatcaatcattggaaaaggaggttttggtactgtttatcatggcatactggaaaataatgatgaagtagctgttaaggttcttgtggagacatccatagcagagtcaaaagactttctccctgaggtacaaaccttgtcaaaagttcatcacaagaatcttgtcgctttggtagggtattgccaaaacaagaagtgccttgcacttgtttatgatttcatgcctagaggaaatcttcaacagcttttaagaggaggatatgacagtttgaattgggaagagcgacttcacattgcacttgatgctgcacaaggtctggaatacctttattgaatcatgcaccccatcaataggtcac

SEQ ID NO: 40829 - DNA, 73 bp, Oryza sativa; identical to SEQ ID NO: 34488
  Clone ID: uC-osroM202032c07a1

SEQ ID NO: 40830 - DNA, 455 bp, Oryza sativa
  Clone ID: uC-osroM202032c08a1
cagtgaagaagaggaaaggagggtaaactatgcatattttcgtcttttacagcagtagcactcactccacgcacggcaaacacatctgcaacccaaggcacaaaacaaaacattgtggtagactcttccttttgacaaccaaaggtattgtgagacgtcgagcgccccctgatctcgcattacacttgctatgatcaggggggcagacatcatcatcgatccgacacaaaacatacacacactcaacacactcagatgtctaataggagaccgagcgaacgacgaaatctcaatcagcaacgcttctcgcctgctgccattgacagtgttcacagttgggagcagggggaggttgaggaaatggtgaatcttcttggagagggtcatatataaccattgtcaaaagctgcaaaaaaagagagagagagagggagaaggggagagaaaagaaaagg

SEQ ID NO: 40831 - DNA, 461 bp, Oryza sativa
  Clone ID: uC-osroM202032c09a1
gtctaacacgcgcttttattaatacaggcattaacgtcagccatcccaaatttcaccagacgtggctcaagttcacaaatcaaatggcgcaacaggacacatttcacaaatcaaacagcgcagcaggaaagtcataacagtacagaacacaggaataacaccatgggagtagcttttatttggggcaatatagtgacgagaagcatacgtagcagtgacatgccacagttgcatttcttcgaaacgaagagcagcggaaagctcttcagagcttcgagatgaggccgttctggatggctttgggcgactcggcttccttgatgtcagcgtcggaggagccgggaggcacgtcgaccgccggcgagcagttgaagaacccatgtggcatgagcatgaagccgatgcgttccactggcatgacaggccagtccttcagccttgggatatgggtgagcccaaac

SEQ ID NO: 40832 - DNA, 461 bp, Oryza sativa
  Clone ID: uC-osroM202032c10a1
tttgtttttagaaaaaaaatgatggaatattcttattttaaatccaacgcactgaacattgtttacaacgtaccaatctggaatattttacatacagaagttccaaaggtgaaactgctgttaaccaataaaagccaacatgccacaccttacgatgcaggcagattagactgcttttatgatcaatctggttggagttaatcctcaacaaaatttctatgatgggccaggtacctatcaacttaaaccagcaccatgcctgctaaagaacactatcagttgctggtagacaccaagatgcgtgatacttcatgtccatggcacatctcacctcagagtgtatctgacctcatagattcagaatgatgcatgacagtcaggatcaatagagcccaaacaagttgctaatagcttagccaaaaagaccacggttgccaatgttcccttgtagttctttcaat

SEQ ID NO: 40833 - DNA, 457 bp, Oryza sativa
  Clone ID: uC-osroM202032c11a1
gaacggcgccatgccggggatgctgcagcagcagcagccgtggtcgttcatcgactaccaccaccacctgatgcaggagagcgcgccgacgacgccgccgctggactacgaggcattcgccggggagttcgacgacgacgtggcgcctctggaggaggtgaagagggagctggtggtggacggcgtcgggttgttccctgggggtggtgcttctgctgctgcggcggcggcggcggtggcggggccgatgactccgaacagcatgtcggtgtcgtcgacgtcgagcgaggcggcggcgtcggcggcggcgccggaggggacgaggagtcggccgggaagtgcaagaaggaggaggagggggacggcggcgacgacgacggcaaggaaggatcgttgacgaccaagggggatggcgatggagaagacaagaacaagaaaggaggtaaggggaagggga

SEQ ID NO: 40834 - DNA, 426 bp, Oryza sativa
  Clone ID: uC-osroM202032c12a1
ttgttttttttttttttttttttttttttttttttttgcatatgaaaccgcttatcacacatacctgacagaataatgtttttcggaccgcttcggccttttgggcacttgaagcatacgttttggcaatgtagacaacaatgtgtggggaatcaagaaccatcgggcacacaacgggatttacattgaagaaaccaaaaacactcaagcagggcacttggcaggactgtggactttggagataaggctcacaactgacataccgaaaacaatcgatccaataagggacatgaaggttccaccctgaggctccccccaaagaaagtgcagctcgagaatccaccagccaagcagcgagtcagctgcaaggtttcctagcacaacataaatggggagcgcctcctgtttcccgcaaatcacgagaca

SEQ ID NO: 40835 - DNA, 514 bp, Oryza sativa
  Clone ID: uC-osroM202032c12b1
tcgtacctgagcacaggagaagccgcagccactgagaaaaacacaaacagtgaagatgtcgcagcctgctgagctttcccgtgaggagaatgtgtacatggctaagcttgcagagcaggccgagaggtatgaggagatggttgagttcatggagaaggttgctaagacagttgactctgaggagctcactgttgaggagcgcaaccttctatcagttgcttacaagaatgttattggtgctcgccgtgcgtcatggcgcatcatatcatccattgaacagaaggaagagagccgtggtaatgaggatcgttgcacgctcatcaaggaatacaggggaaagattgaaactgagctctccaagatctgtgatggcatcctcaagcttcttgactcccaccttgtgccttcatccactgctccagagtccaaggtcttctacctcaagatgaaaggcgactactacaggtacctcgcagagtatatgactgtagctgataggaaggatgcttgtgag

SEQ ID NO: 40836 - DNA, 473 bp, Oryza sativa
  Clone ID: uC-osroM202032d01a1
ttgggttttttttttttgtttgggtttttttttttttttttgtgtatttttgtggattgtttttttgttatttatacatgaaagataaggaccaaaaatacttacagggtaattaaaagggcatccaggagcgaggggacacgagaaccgggaactgcagaggagaagaaaaaacagcggggaaaaaaggggaaaaaggggggaaaacaaccagacccagacatcaaagccagggccctccactataacgtaggggaaaacaacccaggccacgcctctaggatcagggcactaccaggccgtgttgtggggcaccgaggggcctgtaaaggggcccgcctccaagacagaaatgacgaacgcaacgggggctgagaaatagttagctacatggacaggatggagctagcggcgggagcagcggcggacaaggccggcggagaggtgggaagaagcgagcgagcgagcgagag

SEQ ID NO: 40837 - DNA, 510 bp, Oryza sativa
  Clone ID: uC-osroM202032d01b1
tactgttgctgctgttgtcttaagattgttagacctagattctgccatctcatacactcttcgtcagaaggtgggatcaaacaaggagcggggagctggagagttcatgaagcttccgccaagatatactcctgctaagaccaaacaagaaactgaacctatgggaacaggttttgatcgacaagaaacatggctaactccaagcaacggacgaggcggtcggggtggccgtggacgaggtagtcgaggcggtagcaggggaggcagatcccggagtcgtggtggcaaggtcccaagaggtattagcagctcccccaagatcgagttcaggggttacagtgccagcgccgtgtcatctgagaaagctcctcgaaagtatgctcagtgagcgcgtaatcgtggacgtgggcgtggacttagaactgttagacctcggcagtcatcagatattggagccagatcaatttcaaagccaaacttgctgggcagctttagcatgctaaggaatgc

SEQ ID NO: 40838 - DNA, 286 bp, Oryza sativa
  Clone ID: uC-osroM202032d02a1
ggcggccatggacgacttcgactacgagttcgaccacttcgacggcgggcagtacggcgacctggaccacgccatgaagcagaagaagaggaggtcgatcctaaggaagttcggggatttcttccggaggagaagcttgtacaagcgcaacctagcgccggtgattcactactagtagatttttactacttaggttgatctagattagatgctttaatgttttcgcgtgatgctttgtatggtacgtgtttgattgaaatgattagcaaaaaaaaaaacgcccaat

SEQ ID NO: 40839 - DNA, 467 bp, Oryza sativa
  Clone ID: uC-osroM202032d03a1
tttgttttttttttttttttttttttttttttttatttttttttttttttttttttttttttaaaaaattaaaatttaaatttttaaaaaaataaaaaaaaaaaaaaaaaaataaaaaaaaaaaaaaaaaaaaaataaaaacgaaaaaaaaaaaaaaaaaaacaaaaaaaaaggaaaaagaaaagaaaaacaaaagacgaatcaaaaaaaacgaaaccaaaaaaaattaaaaaaaaattccagaaaaaaaaaaaattaaaaaaaagaaagggaaaaagaaaaagaaaaacgagaacccgaaggggcacaaaaaaaaaaataaataaaccaggaaaaaaactaaaagaaaaacaaagcccaataggaaaaacagagaaaaaaaacccaaacgatcaaaaagacacagaacaaaaacacccggaaacataaagaaaaaaaagaacgggtacctaaaagaggaacaaaat

SEQ ID NO: 40840 - DNA, 368 bp, Oryza sativa
  Clone ID: uC-osroM202032d04a1
tttgttttttttttttttcccggtttttttttttttttttttttttttttttttttttggaaaaaaacccggccatgccaccggcaaaaggttaaaaaaaaacaaaaaaccggggccaaaattcaaaatgggggggcaaaacccgggggccccaacggcgagggcccgggaagcccccaacccaaacgcaagcctgacgggctttggaatgagctggagggcaccagtcaaaagcaaaccgcatctttgcccccccccacaaaagacagcccccccttcggatcaacccccaaacccacggcgggggctgacactcccggcctgggggcaccggccggggcggcacaggaaaaaaccagggccccggg

SEQ ID NO: 40841 - DNA, 419 bp, Oryza sativa
  Clone ID: uC-osroM202032d05a1
gtttttaaaacttgcccgcaccacgtaaaataccaaaaatagtttgcatcatacagcacaacaatttacagaagaaactacaagcaaggttaagtagacaacttacaggaacttacacaacttacgcttaaaatctaacataattggtacaaataaaaacaaaaaaaaaaagagggtgacacataggtataagtaatccccttctcgcaacttagaccattacccttgtggtttagagaatgggaccttacaagtaaaagtgatgtgattgtaggggtcggatattcatattgggttcatcttttgctcagttccgatttttgctcttgtcagtggctcttggagcaaggcccactgcatctgacccctgcataatcctgagcctcctacagctgtgtgtgaacattacccacggaaca

SEQ ID NO: 40842 - DNA, 490 bp, Oryza sativa
  Clone ID: uC-osroM202032d05b1
tcaagcttgaagctccccgcactgagccaagaagcctccacctcaatccgaaagagatctcgtgcgcgcacggcgatgcggtgaatcgggcatggcgccgccacaggagcgggactacatcgggctgtcgccggcggcggcggcggcgctggcaacggagctgcgccttgggctgccggggactgcggaggaggctgagtcggagggcggcggaggaggagggacggatgcggctccgctgacgctcgagctgctgcccaagggcggggccaagcgcgggttcgcggacgccatcgttgggggtcccgccggccagcggcgggaggcggccgggggcaaggcggcggcggcggcgggggaggccgaggaggaagaggagaagaagaaggcgcaggcgcccgcggcgaaggcacaagtggtaggatggccaccaatccgcagttccggaagaacaccatggcgatgagccagcctgctttgaaggcaaaga

SEQ ID NO: 40843 - DNA, 504 bp, Oryza sativa
  unsure (1)..(504): unsure at all n locations
  Clone ID: uC-osroM202032d06a1
ggagagcagccggcattggggtgcggccgggcgccgtcgctaagcgcgtgtatcgggtggagctcggaagcaggcgcagccttcaccttagcatagcggggttgccgggacacgcctgggcaagacacccgggctcgaggttgtggtggggtcgtgtggcacgcgatcctcctgcgcgccagccatgaaatcataggaaggtcgtntgttctcggacgaagctactccggagccgcgaggaccaaggcagaaagcagcgaagaggctgcagtcgagcccctcgccttcggaagggtatatattcttacttttacttctgccctctttccccacattgtattttgtggtgccctcttgctctttcttcttctcgcgggattcgtatggctacttagtagcttttgtcttccggatccctaccgataagctccgtgctttgttttgctcgcgcgttttgcttgatgtaaccctaggcattctgaacatacggaaatggtgctgaca

SEQ ID NO: 40844 - DNA, 303 bp, Oryza sativa
  Clone ID: uC-osroM202032d06b1
tagtttcatccaaagaaaggaacagctgcaactttgttggtcagaaaatggctacaggcgttctgtgctccagggaatgttgctctctgcctgctttttgaactcctggacgcgccattgctagaggcacatgacccttcaagccagttcattggagcactactcaacacgatttattcaacctttttagcatttatgcccggactgagatggaatgtgctctgcgtgcggattcccgcaattgcctctctgatagctgcgtcttcattaccatgactgttttttttcatggtcgccattcat

SEQ ID NO: 40845 - DNA, 441 bp, Oryza sativa
  Clone ID: uC-osroM202032d07a1
ctgtaggtacccattcattgaatgatattaacatgcagacaattgaaatgttatcaggatgaaaatacatttgaattggcagtttgagaaataatggaaaagctgaacattgtagttttattcctccctagatcatcagggggactttggcgtatctgagactctatcctgcacattagtacatctgaaacttctccttggtcttctcaaagacttgctctgcaatcagggctccattgccatcagccttcttgatctccatgttggccttctggtaaaacccagtgcctttcagagcatctgcaatgaagtcatcaaatccaatggcaatggcagcttctgccttggctccatacaccagcctcttgatccgggagagatgaactgcaccaaagcacattgggcatggctcacaagacgcgtaaattttacaatctgaga

SEQ ID NO: 40846 - DNA, 249 bp, Oryza sativa
  Clone ID: uC-osroM202032d08a1
gcagtaagagagggatttattatttaactggattacttccatctcttgtaccaaattcacgcaaaacatatactcttttattattcaatgagaaaagcaatgagtgcaatggtgcttttttatcatttcaggaggaacttcttgaaccaatgggcagagttcttggggtatctcttccttccgtcattgtaatctacgaagtttatcccaaatcgaactgtgtagccgttcgaccactcgaagttatca

SEQ ID NO: 40847 - DNA, 351 bp, Oryza sativa
  Clone ID: uC-osroM202032d09a1
aaaaaaaaaaacccccggaaaaaaaaaaaaaaaattaaaaaaaaaaaaatttaaaaaaccaaaaaaaattgttttaaaaaaaaaaaaaaaacacaaaaaaaggaaaaaaaaaagggcaaaaaaaattaaaaaaaaggttttaaaaaaaaaaataacttttggaaaaattgggggggtttggggaaaaaaaaaaggtcaattggccttggggggggggggaaaaacccaaaacccaaaaaaagggccccggaacccccttttggcatttttaaacattctaaaaaaattgggggggggcggggcaccccaaaaagggagggttccaaaatgtccaaaccccccaaatataaa

SEQ ID NO: 40848 - DNA, 81 bp, Oryza sativa
  Clone ID: uC-osroM202032d10a1
ttgtttataaaggaggaacttcaaggctcatgaggctagctagctcacagcctgaagacgctctgacacctgtgaagagga

SEQ ID NO: 40849 - DNA, 462 bp, Oryza sativa
  Clone ID: uC-osroM202032d11a1
ggagagcagccggcatttgggtgcgggcgggcgcgggcgcgacgcgcgtggcgcgggtggagctcggaagcaggcgcagcctccacgggcgcaggcggggttgccgggacgcgcctgggcgggcgggcgggctcgaggttgtggtggggcgtgtggcaggatcctcctcgcgccgccatggatcagaggaaggcgttgttccgggcgaagctccgggagcgcgaggccaaggagaagcaggagaggcgcatcgacccctccctcgtcaggtatatatctcctctactctccctcttcccccatgtatctgtgtgcctctgctcttcttctctcgcggattcgtatgctactagtagttttgtctccggatcctaccgataagctcgtgctgtggctgctcgcgcgtttgcttgatgtaaccctttgcatcttgttcagccggaatggttgctgacagaattg

SEQ ID NO: 40850 - DNA, 463 bp, Oryza sativa
  Clone ID: uC-osroM202032d12a1
ttgtttttttacgcaatatgagcacaactatataacttaataagcacattacagcacacacatggccaaggcagttatttgaatcagtctccaacatacttcaaatcatagaccacaccatacagcaaacatagtataaacattgtcatagagagtacagctgatagcagcttgtaatattctagcattactttggtagcatccctctacaaaacatagcagacatcaccagctcttcatcttggccatacacattcaacatggtttgctagtgacagaccacactgaccagaacatttcgtctcctcagtaggcaccagctgccatgagcagctcatcaaggctccagatgccctcgttgcttgccccgtcttgtgtagcatcattttgcagaaggttgtccattgattcatctgagctgctctcaacataaggtaatggcaaatacttcatctcgggatcg

SEQ ID NO: 40851 - DNA, 453 bp, Oryza sativa
  unsure (1)..(453): unsure at all n locations
  Clone ID: uC-osroM202032e01a1
gagaacccaagtgatcataaatacataaaatgagaacctaagtgatcataaattatacgaccaatggaacatattgtacaaatgaataacaatgagatgtttatgaatcatataaagctacaactgaggaagctacactggttggaatcttatgaatctcccttttttctttctcctatcctacacttgaattgtttccagaagacgacctcaacagttgatgatgattaggggttacagaattgggcatgcctgggttgaacatgatgtttgacgtctgtggggatggctgggtttggatggccgacagcggcagacgaggtccaaatgacagtatttgntgccgntgctgctgttgtaagaatgccatctgggggtgaccatgcccctgcatgttattggcaaatggtgcttgcatactggattgaggcatcgagccttgcacgcccatcg

SEQ ID NO: 40852 - DNA, 462 bp, Oryza sativa
  unsure (1)..(462): unsure at all n locations
  Clone ID: uC-osroM202032e02a1
gagaacccaagtgatcataaatacataaaatgagaacctaagtgatcataaattatacgaccaatggaacatattgtacaaatgaataacaatgagatgtttatgaatcatataaagctacaactgaggaagctacactggttggaatcttatgaatctcccttttttctttctcctatcctacacttgaattgtttccagaagacgacctcaacagttgatgatgattaggggttacagaattgggcatgcctgggttgaacatgatgtttgacgtctgtggggatggctgggtttggatggccgacagcggcagacgaggtccaaatgacagcatctgctgccgctgctgctgttgtaagaatgccatctgggggtgaccatgcccctgcatgttattggcaaatggtgntggcatactggattgaggcatcgagcctggcacgcccatcggtctggggc

SEQ ID NO: 40853 - DNA, 290 bp, Oryza sativa
  Clone ID: uC-osroM202032e02b1
taaatagttcattcagtacactgattcactcactcccgagtcccgacctccctcgcacgtgcttccctgcgtcgaccccgtcccgacccgtccccctcactcgccgccgccgccgccgccgccgacgccgacgccgaggacgacgacgacgatgccgcggaaggcctcgtcgacctcagattcgcgcctgaaatggcggaagtggaagcggaaccccaccgcgtccccgtcgccgtccaaccgctcgtcggccgccgtcgccgcgggggaccacttcgacgacttcgact

SEQ ID NO: 40854 - DNA, 445 bp, Oryza sativa
  Clone ID: uC-osroM202032e04a1
tttggttttttttttttttttggtttttttttttttttttttttttttttttttttttttttttttttttttatttttttttttttttttttaaaaaaaaaaaacctttttttattaaaaaagagaccaaaaaaaaaagtaaaaccgaaaattgggggcccaaaggcaccccaaaaaaaaaaaagtttgggaaaaaaatgagcccaaaaggggaaaccttcatgggttaaaaggaaaaaacttttaaaaccaggggcaaaatttttttggggggggaaaaaaatcaaactgaaaacacttaattccgggggggggagttttaaaagggggggaaaaactttgggttaaaacacgggggaaaaaaaggaaaaaaatcccgaatggggggaaaaaaaaaaaaggcccccgccccggggggccaccccgaaaatccgggccggacccc

SEQ ID NO: 40855 - DNA, 456 bp, Oryza sativa
  Clone ID: uC-osroM202032e05a1
ttttgtttttttttttcttttaagaattggggaactatttattactcatcacttaggtacttcctccattttatattataagactttctagcattggctacattcatatgtatattaatgaatctagacatatatgtatgcgtagattcattaacatatatatatatgctagaaagtcttataacctgaaacggatggagtaattacctcaggttggtacacatatgtacatgcacgaatttcgatgcacaaacacaagcagagctgggtggttgaccgttgacacagccgaagctaactctctacgtgttacaccatttctctcttcttgaacagggtgatcgatctcacttgccggcggccatggcgtcgtagaagcgggtcctcctgacctcctcgggcgggatgaaggcgtcggggccgagcccgggcacgttgaacgccacgtcgtcgatg

SEQ ID NO: 40856 - DNA, 272 bp, Oryza sativa
  Clone ID: uC-osroM202032e05b1
tacatacaagcttgagctgggtgagagagagagagagagagagagagttcttggagggatcgggtgatcgagagatgagatcgagggtggcgctggagacgttggcggaggagccgggcggcggcgaggaggaggcggcgcgttcgaagtaattggatctgcacgtgcgtctgtaccggttggcgcgccgcttgctttccgactctgtgaagacgactgcacctatgttgacttgcgagtctgctatccgtactaactgatgacatggacac

SEQ ID NO: 40857 - DNA, 428 bp, Oryza sativa
  Clone ID: uC-osroM202032e06a1
tttgttttttttttttttttgggttactttttctttgtgtcattaggtttttttttttttttcaccaatagagcattggaagcaaaaggggcaaagctctaatggaccggaaacaaaaaacatcgttttttgggcgacgggcccacgaaggtaggaagaaaggaccctacaaaaaaagaaaaaaaaatgacacacttaagtaacgctcgacggggaagagaagaaactactaatgacgggctattgcaaaaacagaacggccgaacaaggccgaacgcatcggttggggacaggaaataacccccaccggggaggcacagggggggctcctgacacgggggggcgagaacacccttccgtgggagcccacattgggcttcagggggccccgggggcaccccaggagccttaccaaagtggctgacggc

SEQ ID NO: 40858 - DNA, 516 bp, Oryza sativa
  unsure (1)..(516): unsure at all n locations
  Clone ID: uC-osroM202032e06b1
tacgttttggccatggatctgcaaagcttgctcgtcaagctcagagcaaagagaaaactcttgctaagatggaacgaggtgggctcactgagaaggttgtcagggacaaggtactggtgttccgctttacagatgttggcaaacttccaccaccagtgctgcagtttgttgaagtctcattcgggtataccccagataacctcatctacaagaatctcgactttggtgttgatcttgactctagaatcgcactggttggccccaatggtgcgggcaagagtactcttctgaagctcatgacaggtgacctagctccattagatggtatggtcaggcgccacaaccaccttcgaattgcgcagtatcatcagcatctcgcagagaagctggacctggacatgccggccctacagtacatgatgagggaataccctgggaatgaggaggagaagatgagggctgcaattggtaagtttggcctgtctgggaaggcgcangtgatgccaatgaggaatc

SEQ ID NO: 40859 - DNA, 458 bp, Oryza sativa
  Clone ID: uC-osroM202032e07a1
tgttttttttttttttttttttttttttttttttttttttttttaaggtaaaaccaagcgtccccaaacttaagatttttcatggataaagcatcctaagcagcatttggacccccccatttttttttatcaacaaaagtccgttttgacgggttagacactacctagttcaaacttccaatagtcttatgagcaaagtgttttcatattcccccggggggggcgcagcaggccaaaccaactggaaactggcagccccccttggtaaaagctccagggctttgccctccttcggatttcggatttcgcatgggggcaggatttcattttctttcatgacaaccatacccaggaggcacaggttgccccccttggggatggccagtttccggatccggagaaatatcgaccgggcatcgggcctggtctgtagggaactttgatctgggtcagcaccc

SEQ ID NO: 40860 - DNA, 460 bp, Oryza sativa
  Clone ID: uC-osroM202032e08a1
gatcaaatcaagatgctttcaaattccaattcagaaaatagagatgtgtacaggggaagggggaatggagcatactgcatacacaccatcaagctagacaaactgacagaacctaacagacacgcatgaaacttataggaagctagctaaactctaccggtagctgcacatcgatccaacattttcgtcatcatcattggcaaacacgcatagacccacttctttattgtaaccaactgactagcttcatcgcgttctttatctgcatattttttattcttcagtaactcaaaagtttggtccagcagcgaggatcttgtctgtcaggctgctgtctcccccgatcttgtagttggcgaacacctcgaagttcttcttgaacaggccagccagcttcaggagcgtctccttgtacgcgcccttgtccgtccaggtgttgatcgggtcgaggatttcagac

SEQ ID NO: 40861 - DNA, 457 bp, Oryza sativa
  Clone ID: uC-osroM202032e09a1
atgaaaaatcaagattcattaagctggaaaaaagggatggtatatatgttatttatacatgaaagataatgaccaaaaatacttacagggtaattaaagtgcagtaacaagcgagcaaacatgagaatttgctactacagaggagatgaattaacagctgtaataaaaggaaaaaaagtattaattacatttagatccagacatttctgtcaaggccctccactttaactagccttctcatcccagtccacccctctcggctcagtacactaccaagctgtgttgttattcaccgatgtttttgcagccaaccccctctccttgactgaaattacgtacgtaacgtgggctgtgtatctactcaactacatggacaggattgagctagcggcggaggcggcggcggccatggccggcggcgaggtgggaagaagcgagcgagcgagcgagagagaga

SEQ ID NO: 40862 - DNA, 446 bp, Oryza sativa
  Clone ID: uC-osroM202032e10a1
ccaaggtacgaattatcaatcaagaaattatcaaaccatccaaatgaggaacatagataattttccagtcggacgctaactgatagggataaaacaactatcagcaatgacagattgttctatatatcctttatttgggaggtcccgtctacgtgatatcagcatctatggactgcttggatcgacaacaatttgtaccgatgctgtaaatgttcattcagtccagaatgagaactcgaatggtaatggtgatacagccaaaatgactttaaaagaagggaaatgaagcactgaagttggcaagagtatcttgtaaaaagctcagttggctgccagtcttgaccggagctccgcagcaaccgcatcaatgaactcttcagtgttcaggtaatggcttcttgtgacgtttgaagacccgtgaataagaagagcaaggtctttggtca

SEQ ID NO: 40863 - DNA, 437 bp, Oryza sativa
  Clone ID: uC-osroM202032e11a1
caccatgacagcaagccatgagcccatgacttcactatcaccaagagagcaatggaggcgaaaattttcaagctctaatagagaggaaacaaaaaacattgtctttttgcccacaaacgcatgtaggtaggtagaaaggatccttcaaaatatctttcaaaaatgacacaattaagttttgctagtctcagtagagaagtgactactaattactgtcgattgctcaaacagaacggtcgcacaatgccgatcgcaacacttgcaaacaggagctgacttagaccttgaatccacggttgttcctcctgccacgggccttctcgaacttccttcccttggagcgcacatatggcttcgtgtggctgtgcggcacaccaggagccttaccaaagtgcctgacggcctcacgggcatttttgggacccctcaagaggacc

SEQ ID NO: 40864 - DNA, 430 bp, Oryza sativa
  Clone ID: uC-osroM202032e12a1
ttgttttttttttcttaaaaggaaatttctctcaaggatcattaggtgcaaaaaaggaatacattacatggtctttttgtttacatggttctaaattcagagataacaaagaggtcagaatcctctgctgggaaatactaacactaaatgaagtacaagcaggctctactatgtacagatcacatacacctaactttttgacaaaatcattagtttcagttgaccagatgtctctagaacttctgcatcaaccccaagatcgatctttgatctaaattttttacaacctgttttcaccaggctcatactattgggacaagccttggccttgctggggggcgatgcgaagcctttctcgaggctctggagagcctacccacagatgccagcttcagcgctgccctgatcttgacccacttgcgtggggaca

SEQ ID NO: 40865 - DNA, 462 bp, Oryza sativa
  Clone ID: uC-osroM202032f01a1
atgcaactccttttttccatatcatttatagaaagatcagcaatacaaacacaaccatccggacaagaggatggtaacatctggaagagaagtagagagctcttagctctaaattatcactccagttagaggaagacatagccacagctaatacattacacaagtgacactgcaaggcagagtgttgtgctcatatatgagcaactatggagcatacaaggcctaatggaggaaatccctcataggatcatcatggtgaattctcttcatgcggtaagcctccatgtcttccgcggtgacctcatcattccatttcacattgtacttcctcttcctttcatccatctcctctttcctcctcgcaccctccttctttagggcttcatcaagcagcttcttgtcaagaacaatatcattaggcacatcagttccccaggtggccagtcgcttttcttcatgtcg

SEQ ID NO: 40866 - DNA, 430 bp, Oryza sativa
  Clone ID: uC-osroM202032f02a1
tttgtttttttaattattttttgtttttttttttttttttttttttttttttttttttttttttttttttttttttttttttttttttttttttttttttttttgtaaaaaaccaacatttcaaaaaagggggccaaaacaggcccccccagacattaacaaaaaaaggggttgggcgccccccccaacctgaaaaaaaaaccaaaaaacaatttacaacaaacgtaagggggacaaaaaaaaaaacctaccccccggggagatagtatgaagtggggaaaaaaaaacaccgttaattaccggcaaaaaaaaggggcctgccctttttaaggggaaacctggggccaccggaaaggggcaattaaaaaaggaaggggaagccttttccgcggggccggcaaccgcaaaaaaaagccccgagaaggtaggg

SEQ ID NO: 40867 - DNA, 451 bp, Oryza sativa
  Clone ID: uC-osroM202032f03a1
gattgaggaagcgcggcaataaaacattgcattgaattctgaacgataaacaccaggaaccggcgtttatttgaggcaagcactgcccaaaatctcgcaaaagtactgaaaccttagacatagaacacattcatggcaaacatggatgccaaatgacaactacagaaaattatcaaattcgaatgcagctgacggcttctcctctgaagatgcatattttcccctccattacttggatgtgctctctccatcgacagccaatgggacggcgctggccaggctgcggtatttcagagcatagaacatctcaatgtaacggcgagtctcgcgcctgttaaggttgcttacgtacttccagaatccgtatacaccagttaaggtcatcagcctctcagagtacagcttccaggtgtacttctggtaaatcctctgcagacctccctgtgaaata

SEQ ID NO: 40868 - DNA, 440 bp, Oryza sativa
  Clone ID: uC-osroM202032f03b1
gtcatggctgccaagctagctcgcctccacagtctccgcgaacgcctcggtgccaccttctcgtctcatcccaatgagttgattgcactcttctctaggtatgttaaccagggaaagggaatgctccagcgtcaccagctgcttgcggagttcgatgccttgatcgaagctgacaaagagaaatatgctccctttgaagacattctccgggctgctcaggaagccattgtgctgccgccctgggttgcactggccatcaggccaaggcctggtgtctgggactacattcgggtgaatgtaagtgagttggcagtggaagagctgagtgtttctgagtacttggcattcaaggaacagcttgttgatggacacaccaacagcaactttgttcttgagcttgattttgagcccttcaatgcctccttcccgcgcccgttcat

SEQ ID NO: 40869 - DNA, 467 bp, Oryza sativa
  Clone ID: uC-osroM202032f04a1
ttttgttttttttttttttaatgacaatgcaacaattcttctggaccatgatgactgtacatcaacagcagcaggtacacaaactgaaactctaatggcacaaagtcagaaatctatctcaagttcacaaacagcaccttttaacaaagtttcagttcaccaagaagagcaaacaagatgaaaaagatcaagctacaataataattccatcaatgctacaacaaaaaaaaaagaaaaaaaaagaagaggacaggatcggtgtaaccaacgaacaatcagaaggcacggtgatctacatgatgatgacaggcacgaagagtatggacatggagattcttctgcagcacagcatcggccatatgcatcaagcgtccgggccagtcggatgcggcttgtcagcgtagttgtgctgtttgctgtacgcacggtggcgccgctccctggcgtagatcacccagaagacgagg

SEQ ID NO: 40870 - DNA, 460 bp, Oryza sativa
  Clone ID: uC-osroM202032f05a1
ttttgtttttttttttttttttttttttttttttttttttttttttttttttttttttaaaaagagggaagccccctggatcgcaggggtcatcaaacaatttattgaaaagggaggcaaaacaaaacatggggcaaaacaaacccctattccacagtatccatgagctcaatcctggggctactccatagagggggaaattaagcaaaagtcctcaggcagattaatgcctttaaaaccgccaaaaagaaccctggggggatcccccaggcgtttcccaaaacgcgataactaaaacaaccctccccatttttagccggcgtagctgaaacctgagatcttggaaaccccgaggggtccatttgggaaacccgcataaagggggcttccatttgggctccaaataaagcttgggcaaaaaagcatttggttcttggagacagggatctcgggcttaagg

SEQ ID NO: 40871 - DNA, 460 bp, Oryza sativa
  Clone ID: uC-osroM202032f06a1
ttttgtttcagtctcgaacaaggcacacaaacagatgttgatataatggcaatgttcttattagctagtcccaacactaaaccattggcaaacaatgcaacatttttcccatgctaagtttcttattttttgtcacaagtactgcaccttaaaattacagctgcagcaatccactagatcatcatattaaccataacccacaaaggattttcaagtccacatgagtcaatcaagcagctccacttttatttcttactggttgcaacattggaactgcccactgacaccccttcaggtggatcacttggatttggctggggctgggagcaactgatagcaagcaatgagtgagctagcaaatccaaacgcccctgtcacacgcggagtcactttcttgggagccagttgaagcagccctatagcaacaactatgtcgaggctcgatttgatgagagcgaga

SEQ ID NO: 40872 - DNA, 471 bp, Oryza sativa
  unsure (1)..(471): unsure at all n locations
  Clone ID: uC-osroM202032f07a1
ttgtttttttaggacaaaagtagaaagcttaacatataccacacatcttgccgagctcaccctcacagcattgttgttcgaaatagggacggacaaacaacacaggttcagctagaaattcctaaaaacagttgagttcatggtgtagctatagatgatcacattggattttgggtgttcattcatgcctcgggaaatatttaacttaagctgcggaagacatctcaaagtgattgcctagcctaatcccagccttgagcagctggttgagctgccgggtcccatccagtaggcgcaaccggtggaacgacggcggcttcagtggctacgggtgctcctgcttgatcccatccttcggcagcagcaactggagctggagctgngnnccaatcaccaacagtagcagctgggggagcagccacatcagaggtccactggtcagcagaccattgttcaggtgcggtgtaatca

SEQ ID NO: 40873 - DNA, 464 bp, Oryza sativa
  Clone ID: uC-osroM202032f08a1
gaatcagtctccaacatacttcaaatcatagaccacaccatacagcaaacatagtataaacattgtcatagagagtacagctgatagcagcttgtaatattctagcattactttggtagcatccctctacaaaacatagcagacatcaccagctcttcatcttggccatacacattcaacctgacaagaaaaccatatcccattttacaacatatgtaatctgtacatgaaaatgtatctacaagaaatcaaaatagtaggtagtgtggagtgccttacatggtttgctagtgacagaccacactgaccagaacatttcgtctcctcagtaggcaccagctgccatgagcagctcatcaaggctccagatgccctcgttgcttgccccgtcttgtgtagcatcattttgcagaaggttgtccattgattcatctgagctgctctcaacataaggtaatggcaaa

SEQ ID NO: 40874 - DNA, 438 bp, Oryza sativa
  Clone ID: uC-osroM202032f09a1
actctcagaacgtgacacacccatatatacacgacgaaccgatcaaaacaacaacacacaagacggtaggttcaccgacggcgagaaatggttggcacacggccatgaacggctgagatcgcacacacatagagacagacaatgtactctcagaaacgcacccattacacgatgaaaaccaatcaaacacgaaaaaaaaaagcacaaaagaccgacaaacaacgcctgcgacgacggaggcatgtgggggccagagaggggcaccgcgtcactgacgctgggccccaccgccctcgatgacaaactcttttatttagccccacgtcacgcgtacccacacacacctacggagtcgagtactaccactccagctcactcaactcatcactcgctacacgcacacgtacgtacaactccggcgagtcgccggcggcggcg

SEQ ID NO: 40875 - DNA, 460 bp, Oryza sativa
  Clone ID: uC-osroM202032f09b1
tcgtgttcagtttagctctcttgctcctctagctgaccactctactatacacacacatatatacttttttcttggtgtattagtaagcacacctcatcgacatcaatggccaccgtagaggttgagaccccgaccaccgtgctggccgaggaggcgccagtggaggcgacgccggcggccgccgccgccgaggtggaggcgccgaaggaggagacgccggcggcgccggccgaggctgtggccgaggaggcggcgcccgccgaggccgaggtggcggagaccaaggaggcggagccagctgcggccgagccggcggccgaagaggtgaaagaagcccgagcccgagccggtcgagccggaggccgagcctgccaaggaggaggtggcgccagagtccgtcgccgccgacgaggcggaggccaaggaggccgagccggcggcgcaagtggacgaggaggtg

SEQ ID NO: 40876 - DNA, 457 bp, Oryza sativa
  Clone ID: uC-osroM202032f10a1
ttgttttagacagcacaagataactgtactatttagtctggcagcccaaaagaaaaaggtatggctaaaccattacgaaccctctttatctagacaagctgatatatacactaacttacatggcgagcacataataacgtatagaaataaatttcagcagcacggaaaacataaaaagacgcgtctgtgatacatacacaatcctgaaattggagagactgctttgtttcagtaaattttcggcttccggaccctctgacttctccggctattcaccgccaccaagactgccttttcaatcctcggtttggagggggtgctttcgcttatatccttccttgcagcacaggatgaattctcagcttcctgattcttggtagatgagcatgactttccagcttttcgcttctttccagttgagtgagtcttcacagctttcttcccttcatctggggct

SEQ ID NO: 40877 - DNA, 384 bp, Oryza sativa
  Clone ID: uC-osroM202032f10b1
tcgtttaaaccaagcggcgccgaaggaaaggcgagcgccagggccatgccccaaatcgatctcgcctcgagctcgaggccctcgcgcccgcggattccagccgattgaatcccccccacccctaaccccgttctctcggtgctctgctcgttataagcgggtggcctttagccctaggttttttgttcgattgggattttatatatcccgcttggttggggggggggggatccgtttgaatggccggagccggtggtaaccgcggatgttggcggcggcgagcgaccttatcacctcgaccggccaccgtgacgtcgtcgtcaggacagaggaggaaatgaacatgggccttctacacaacttcctgagcgtgcccttcatgtt

SEQ ID NO: 40878 - DNA, 389 bp, Oryza sativa
  Clone ID: uC-osroM202032f11a1
tttgtttttttttgcacctgaagtaatgccagagagcttcaaagtcgttcttctcatgcattgactacatattccctgtctcctaaaaatgccaactcctgactataaatctgaacatatgctgtgcttagattcatagatagtacttagcttttctaggtggatggagtatcaagtttgtattaatgtaaaataacagggtgtaacatatgtttgttccaatatgttgcatctgaacgaagttgtcctttcgatgcgttgttattgcatatcaagcatgtgttagtgtaacataatacactgtttcgatggtatactttgtggtacagtttcaggttacaaatcaaatttcttgtgcctttatcttagtatggaaaactctatcgcgt

SEQ ID NO: 40879 - DNA, 418 bp, Oryza sativa
  Clone ID: uC-osroM202032f11b1
tcgttctccgactcccctgccctaccctacccacgcccaccgatctgatccacctcgcccctcccctcctctccttgcccgcctcggcctccgggctccggcgatggcggcggggaacggccggatggaggcggcgctgggctgcctcgcggcgctccccgacgaggtgctctgcgccgtcgtggacctcctcccgcccaccgacgtgagccgcctcgcctgcgtcagcagtgtcatgtacatactttgcaatgaggagcctctctggatgagcaagtgtctttcagatgggggtcttcttgtgtatagaggttcttggaagaaaacagcattgactagacttagtctttgttcagaaaatgatgagatttaccagaagcctcgccattttgatggggtcaattccatgcacttatac

SEQ ID NO: 40880 - DNA, 442 bp, Oryza sativa
  unsure (1)..(442): unsure at all n locations
  Clone ID: uC-osroM202032f12a1
cacgggttaacatgcttgttaatcccatgtcattacacatttattacccagtaaaacgtacaacggctggtccaacatgtatgtacaaacaaacaaggtaaggagcagccactagctgctgcaactaaccaatatgcatgtcacacaggtacgtaataatacaatgtgtaaaaaaagtccttcttactaagttaaactatttaaccggagtattaacattctaaaacattttcgggcttattttgttcccctgaactacttaaaaagttcagctgatggtttttttttttgaaattttgaggcgtgatagaattacaaacttaattatgtcacaactcttttttttttagttttgaactatatattgtttgcaaagattgaaaacacccaatacctaaacttcatgatattaaaaataattgngaactacccaaattctttt

SEQ ID NO: 40881 - DNA, 471 bp, Oryza sativa
  Clone ID: uC-osroM202032g01a1
ttttgtttattccgaaagggcaaggattacccaaatagcttattattcgtcaaacaaatgataatatacatggtacaggaacaaatattgtgtaaagagaatgctcattagttgtaaatacatcagcggtaattcagcattctatcaaccatactaggtgcaaatgaaaagtcttatcggcaagattccgtcaggaggatttccacaatactagggaacagttcaagcttcaaggaggaaattcagcaatctatgttgtgcaaataacctttgcttttgcaactcacctttagctgaggacatgactgccatagtcttgattgaatttttcgtatctatgtacatgaagatgagcagatggccgtgtattccttagtgcaagctcaatgtcttctgtcgttactggaccaacttcaggcaacttatcctcaggcacttcttcttgccttccttcaagaaccgacattaacc

SEQ ID NO: 40882 - DNA, 462 bp, Oryza sativa
  Clone ID: uC-osroM202032g02a1
cttaaaaggaaatttctctcaaggatcattaggtgcaaaaaaggaatacattacatggtctttttgtttacatggttctaaattcagagataacaaagaggtcagaatcctctgctgggaaatactaacactaaatgaagtacaagcaggctctactatgtacagatcacatacacctaactttttgacaaaatcattagtttcagttgaccagatgtctctagaacttctgcatcaaccccaagatcgatctttgatctaaattttttacaacctgttttcaccaggctcatactattgggacaagccttggccttgctggggggcgatgcgaagcctttctcgaggctctggagagcctacccacagatgccagcttcagcgctgccctgatcttgacccacttgcgtggggacagtggcaccgcaactccttcgttgctagaaaactgagaaatgaaat

SEQ ID NO: 40883 - DNA, 348 bp, Oryza sativa
  Clone ID: uC-osroM202032g03a1
ttttggttaatcggagaaaattcgcccaattttcttccaatctgcttcttaattcttatacaagcagagagatttgattttgaattttttttacagggcatggtgcgcgtcccgggcatcggcctcgtatacaccgacctcacctccggcgtgccggccatctaataccgcttcgtcaccaacctcccggcgttccaccgcgtgctggtgtacgtctgcgtcaagtccgtcccggtaccgcacgtgctttccgccgagcgctacctcgacggccgcgtcggcccggctgggcaccggtcgaaccggtgcatcgtgcggcacggcttcggggacgtgcaccaggacgag

SEQ ID NO: 40884 - DNA, 198 bp, Oryza sativa
  Clone ID: uC-osroM202032g03b1
agcttattagcggccatgttgcggcggatcaattatatacagggtcaaacatgcctctatttttgtaggaggtagctttataaattttaacaatgatggaagtttttaatacgaaatttttttgaagggtattgagggcagaatttgggaaaggccttgatgtgtttattaaatcttaaggacttattcaaagaattc

SEQ ID NO: 40885 - DNA, 418 bp, Oryza sativa
  Clone ID: uC-osroM202032g04a1
cagactaaattctcattcgcccttgttattggagttgttgattgtcttaacatagcacaaacaccagtcacgtgatatatgtatctaattggataccactggatgacatcaactcaaatatgagtagttagggttcaggatcagagcaaaatgttgaaaacccccctcactaaagcatcttgatctataaggctatacaagaatctcatctatcaacaaaagctttgtagcagaacaccagcgttgtcttgacaagtttcactggctgaaacccaatctgaatccgtagagaagatcagcaagctcgaagcatctgcatttatcaagtgcagtgagcggcattattagctgcaggcagtgctcaccacaattatgttgacaaagaatgggttcagtataccgcagaagcatgatttct

SEQ ID NO: 40886 - DNA, 449 bp, Oryza sativa
  Clone ID: uC-osroM202032g05a1
gaggaagcgcggcaataaaacattgcattgaattctgaacgataaacaccaggaaccggcgtttatttgaggcaagcactgcccaaaatctcgcaaaagtactgaaaccttagacatagtacacatccatggcaaacatggatgccaaatgacaactacagaaaattatcaaattcgaatgcagctgacggcttctcctgctgaagatgcatattttcccctccattacttggatgtgctctctccatcgacagccaatgggacggcgctggccaggctgcggtatttcagagcatagaacatctcaatgtaacggcgagtctcgcgcctctcaaggttgcttacgtacttccagaatccgtatacaccagtcaaggtcatcagcctctcagagtacagcttccaggtgtacttctcgtaaatcctctgcagacctccctgtgaaatat

SEQ ID NO: 40887 - DNA, 524 bp, Oryza sativa
  Clone ID: uC-osroM202032g06b1
gatatcaaacagagagcaattctcttctcctacctagcaacctagtgcagtgcagtgcagtgcagcgaaggtttacttggcgacttccatgggttgcctgttgatgctctgcttggtttctcccctcctcctcgccacctctgtccacggcaacccgtggtatgggtatgggtatggcttgttcccgcagttctacgaccactcgtgccccaaggcgaaggagatcgtgcagtccatcgtagcacaggcggtggccagggagaccaggatggcggcatccttggtcaggctgcattttcatgactgctttgtcaaggggtgtgacgcgtctgtgctcctggacaacagcaccaccatcatcagtgagaaggggtcaaaccctaacatgaactccctcaggggtttcgaggtcgtcgacgagatcaaggccgccctcgaagcagcttgccccggcaccgtctcctgcgccgacatacttcgccctcgctgcacgcgatttcactgtcctcgttggtggcccgtac

SEQ ID NO: 40888 - DNA, 466 bp, Oryza sativa
  unsure (1)..(466): unsure at all n locations
  Clone ID: uC-osroM202032g07a1
tgtttttgatcacaagaggaattgatataatgacatagtttataacattacataacacaaacaacataattaacccttacaaaacaccacatggacacagacaaaagaccatcacttattcagacacaaaatcatcatcagaagagtagtagaagaagaccatagagcagcagcagattaaagccttgaaattctcaaagcagccaagagaagaaaaaagatgaagacttcttgatgccaaccacagcttagctcagagctcactctcccatggcgcggcgttcgttcagtactggagcatgtgcgcggtggcggggcaggggatctgccatggccggagcagcgggtcgtcgggggggcactcctcctggatgtccatggcgacgccgctgaactcctngacgacgcggagcaccttgttgacgctgcgcagcctgtcgccgagctcggcggcgcgcgcccggag

SEQ ID NO: 40889 - DNA, 447 bp, Oryza sativa
  unsure (1)..(447): unsure at all n locations
  Clone ID: uC-osroM202032g08a1
aacagacaacagagagagtgctcatgtaatgacctgattgaaatgtctaatgtttcaagatacaggcattcctcgccatgccaccaattgatatatacatacatgcacggtgctatttacaacttccaagcacacaaacatgctagcaacacagaaaacgagatgacaaactcttgggcaacagaacgatcaattagaccaacacatttcccacatgcaccaaacaacatgacaatctaaaacttaaaaagaaaatgaacagcacaacatgcaacaaaaagaatggattgctgttaatttcctgcaggatcctcagaagcagtacgcctccttagcttggagcgagtcacacggatcgtctcctccattggtctctcctctactgnctcacctggaacaggatcaccctcttctgtgccctctacggcatcatcagcctcgtcaatg

SEQ ID NO: 40890 - DNA, 450 bp, Oryza sativa
  Clone ID: uC-osroM202032g09a1
ttgtttttttttttttttttgttttttttttttttttttttttttattggaaacagtctccaacatacttcaaatcatagaccacaccatacaggaaacatagtataaacattggcatagagaggacagctgatagcagctgggaatattctagcattactttgggggcatccctttacaaaacatggcagacattaccagctttttatgttggccatacacattcaacagggtttggtagggacagaccacactggccagaacatttcgtctccttagaagggaccagctgccatgagcagctcatcaagggtccagatgccctcgttggttgccccgtcttggggagcatcattttgcaaaagggtggccattgattcatttgagggggtttaaacaaaagggaatggcaaatacttcatctcgggaacgaaggggggcatgttttgg

SEQ ID NO: 40891 - DNA, 441 bp, Oryza sativa
  Clone ID: uC-osroM202032g10a1
ttggttttttttttttttttttttttttttttttttttttttttttttttttttttttttttttttttttttttttttttttttttttttaaattttttttaaatttttttttttttttttttaggacacaaaaaagggaaacataaaaaacattttaaatttccccaaaaaaaaaaattttaattaaagggaaaaaaaaccccgcaaaaaaaaaaaatttttccctccattttaaaaaaaaggtgtctccattgaaaaacaatgggaaaaaaatggacaaaaaaaaaaaaaaaacagcaaaaaatattttaacggagcggggaaaaaaaaaactttgaaacccctttaaaaaaaaaaaaaacggggaaacaggagaaaaggttttcagcaaaaaaaagtacaggttgcaggtggccctaaaaaaaagagttttaataaaa

SEQ ID NO: 40892 - DNA, 467 bp, Oryza sativa
  Clone ID: uC-osroM202032g11a1
tttgtttttttttttttttttggttttactccagaccaaacaattacttcaaaattcttaacttcatcatcaagaccaaacaaagcaaacgcatagactcaaaaacattcatttctcatcagaaagcaaatatgcagctggcaagtaatcccaacaaactattcagaatatctgccattgacacaggctaggatgttcacgatccacaactagatagctgtttacttggtggctaaataaacgggcagcaaaataagggataatctctactcggcagcagcgacctcctgcccggccatggcctcatcttctgcaggcctatcaagcttcgtaccgatgtcctccttggcatagtcaccatgcacctccatgagcttccccaggtcaaatttcggggcctttagaatcttcactttgcggacaaacacattctgaagggggaaaatactggatgtcgccttctcaat

SEQ ID NO: 40893 - DNA, 463 bp, Oryza sativa
  Clone ID: uC-osroM202032g12a1
tttgttttttttttttttttggttttttttttttttttttttttttttttttttttttttttttttttttttttttttttttttttaaagggaaaggggccttaaaaaagggggggaaaaaaattcaaaatttgggtttccccttccaaaaaaaaattggaaaagggggccttttaaaaggcccggggtggaaaaaaagaggggaaaccggaaaaaacaaagccggggaacgtttcaaacccggggaaaataaaaaaaaggaaacctccaatgcatgcaaaccggcccggatacttaaaaaaatgggggccacccccttttaagcgtggccctgggggggaacgggggggtttgagcccaaaaaaacggggccgaacaaaagcccggggggggcccccccaaaaagggggcccccccaaaaaacccaggggccaaaaaaatttccggggggaacgggggggcc

SEQ ID NO: 40894 - DNA, 535 bp, Oryza sativa
  Clone ID: uC-osroM202032g12b1
tcgttctctttcaagcgtagagacctctccacacttatcagagtaataaggaaaaaaatatagattaaaaatggtgaagctcgcattcggaagcttgggtgactccttcagcgccacgtccgtgaaggcctacgtggcggagttcatcgccaccctcctcttcgtcttcgctggcgtcggatccgccattgcctatgggcaattgaccaatggtggcgccctcgacccggccggccttgtggcgatcgcgatcgcccatgcactcgccctgttcgtgggcgtttccgtcgccgccaacatctccggcggccaccttaacccggccgtgacgttcggcctcgccgtcggcggccacatcaccatcctcaccggactcttctactggatcgcccagctgctaggcgcctccatcgcctgcctcctcctcaagtttgtcacccacggcaaggccatcccgacgcacggcgtcgccggcatcagcgagctggagggcgtcgtgatggagatcgtcatcacgttcgcgctggtgtacacg

SEQ ID NO: 40895 - DNA, 449 bp, Oryza sativa
  Clone ID: uC-osroM202032h01a1
agtccacacaaaacggaacaagtcttatttccaaggcaaattaacaaatgcaaacagatttacaaacggaagaaatcaactgcacgctacagacagtatccactaaaattattccgtaaccaaatcaaatgagtagatcagatggttttgttgatgaaagaaaatgcagaaaatgatgggagatcgacggcggccggctacgatcacttgaacttggccttgatggcgtccacctgcgggacgtcgacgcggaaggccttggcgaggacgtcggacggcacgggcggcgcggcggcgaagagcgtggcggcgatggcctgggtgccctggagctggctgttgaaggcggcgatgacggcggcggggccgtggccgcggttctgctggaagtggacgaggccgcgcgggaagacgaagacctcgccggcggtgacagtctttgtgaagag

SEQ ID NO: 40896 - DNA, 430 bp, Oryza sativa
  Clone ID: uC-osroM202032h02a1
tttgttttttttttttttttgggttttttttttttttttttttttttttttttttttttttttaaaaaaaaaaacaaggggttaatggggacattaagcccctagtttaggggggccccaaagaaaacaccttctttttttttcctaaaaggggggccccaagattggcccgaaaatccttttggccaacatattaattcaggggggactggataagggttgggttcccgggttagacacattccagccggccttttggttttagttcacactttcacaacttacttagggctcccggtgcccctgggggggttgggggaacaaaaactcaagggccctccctgaacccttaaattcaagcatgcggggggctacttggaagctttgggagactattgggtcaggggcctttgaaaacccccccagaagg

SEQ ID NO: 40897 - DNA, 438 bp, Oryza sativa
  Clone ID: uC-osroM202032h03a1
ttttgtttttttttttttttttttcagactaaattctcattcgcccttgttattggagttgttgattgtcttaacatagcacaaacaccagtcacgtgatatatgtatctaattggataccactggatgacatcaactcaaatatgagtagttagggttcaggatcagagcaaaatgttgaaaacccccctcactaaagcatcttgatctataggctatacaagaatctcatttatcaacaaaagctttgtagcagaacaccagcgttgtcttgacaagtttcactggctgaaacccaatctgaatccgtagagaagatcagcaagctcgaagcatctgcatttatcaagtgcagtgagcggcattattagctgaaggcagtgctcaccacaattttgttgacaaagaatgtgttcagtataccccagaagcatgatt

SEQ ID NO: 40898 - DNA, 70 bp, Oryza sativa
  Clone ID: uC-osroM202032h04a1
acccacgcgttcgagccttcttgagaggtcacgggaaacaccctatctatcatggagcactaggcgaata

SEQ ID NO: 40899 - DNA, 311 bp, Oryza sativa
  Clone ID: uC-osroM202032h04b1
gtctttattcacatccacgatccgcctgccgtttctgacacttaggccgaagaccgggaccgaccacatgaccgacaggaatgtcggttgcagcctatccaagcgcatgtccagcttgtgcgaatgaataagcgattccagtaacctgcggaccataacgccactcaacggcttctccaccaggctcccatatggcgagtcctactttgggcaccctaccggccgttcatgcgacgggaggcttattgtggattgcttagcggctgtcctggggcttccggacctgacggctatactgcatcctaatttta

SEQ ID NO: 40900 - DNA, 470 bp, Oryza sativa
  Clone ID: uC-osroM202032h05a1
ttttgttttttttttggtccaacgttgctcgagcgttaattcccggggcccatcatcaggctgttccccacaacgaatatatactcaattcttaaaaaacaaaagacgatgtgcgtcatattctttcatacagcgcttcccgttttacattgccttccaacagttcacatcttcgttgaaaagaattgagcaatggctctcagattctatgcatgcagttatacaacaaggtaaagtatgccacaataaacgccctacaagagttacaagacctaaacctcagcaatcccagatttctgacagttgcaaaactatggaatgcagcgcatccctattccctccgaatatgactagtctctcatcatgataaaaagttgaaaaccatggtcataatttaaaggtgttcattcactcgtatgggttcctgaagttcttgaggagttctggaatgtcgtatccaagcatatcat

SEQ ID NO: 40901 - DNA, 150 bp, Oryza sativa
  Clone ID: uC-osroM202032h06a1
tttgtttttttattttacaagggattattattcagagtacacaaaatgacactcggtgaacaggacagactagtaataaaattcaaagggccttgtcgacgccaaggatagaccgagaccgaaatccaacgttgacacatcacggttgat

SEQ ID NO: 40902 - DNA, 469 bp, Oryza sativa
  unsure (1)..(469): unsure at all n locations
  Clone ID: uC-osroM202032h07a1
ttgtttttttttttttttttttttttttttttttttttttttttttttttttttggggaaaaaagaaacaatttttttaatcataacacctaacaggaaataataataaaaagatttaagaatttattatccacagtccaaggccatggcctttccccttataaaaaacgggatgtattggtatctggatccatatggggccaacattttctttgcctttttttaaaaccccaattggggaacaaaaataaccctttttgacttattcccaatctgaatacacttaaattttttttttcccccctaaatgcccctntctctctctctctctctctttttcccagaaaatttgcccccaaaagaatttcaaacattttgtggggaagaagaagaagaaagaaagaaagaaagaaaaaacaaattttaaaaaaaattcctctcacatgatgaactgaactcatttagaagg

SEQ ID NO: 40903 - DNA, 455 bp, Oryza sativa
  Clone ID: uC-osroM202032h08a1
ttggtttttttttttttcaccgcacaaagttcacatcacatacttgccatctgttagcttcagggcttgtttggaacataagactttacaaaaatttgttcaaatatagtaaacttcctcctctccaaagaagtcctatatggcgattgaaatggaattgtaagttaattttatacaattacctactgttaacaatgaatgttcatcaggaaggaaatttgtgctagatgcatcccttcaccattttttgcacacgcctacaatgcttccactgcgtctatagtccatattgctttgtcaacctgttccctttgttgtaggggtgtccaataattcatcattactaacccattgttcccttcctgcgggatctccagcggtgacaatagaaatatctccaagcgtaggagtaggagtagaaaattttgacgtcgtagctttaggcacattacctt

SEQ ID NO: 40904 - DNA, 474 bp, Oryza sativa
  Clone ID: uC-osroM202032h09a1
tttgttttttgaagatttaataaatgattactgtgggaataataaaaagattaacatacttggtagcactgactacttataaatagtatgcctggagcacatataaaactcatcactctaaactcctacatgtacgggacacaagtactaatttctagcaagaaaaaactaagatgaaatgctcaagcccagtcgcaaactcctcgaatctaactacagacatgacagtaaaacataatacatgataacaatagtccccgcaaaaaaaaaaaacaatagcataatatacatacatatagggtaactttggcaaacatgaccagcatagtacaatggagaagatagcagctggcagattattatgggattttttgacacataattacaaccatcataggcaggttgccaagaaacgaagagctttagctatgtaggccctagcttcagcagtagaacatgacccttttcacacta

SEQ ID NO: 40905 - DNA, 460 bp, Oryza sativa
  Clone ID: uC-osroM202032h10a1
gaaaaaatggaggtaatagatagatatgacgtttcgtatgctctacacgtatcatgaatatcaccatcatcatatctagcttagctctctacacaagtgctactattgaattggggctaaaaaataggtgagcggattaacagcaggtaatggatagcagcctagtggacaaatgttacgtttgggggggggacgcccacatctggtaatatgactcctgtgcctccgcaattctcgaatggaaaattccccattctttgcgacaacgttcccttaccccttcccacggtgccctcccgagctctgactgcccctggttcccaagagaaggaaccacttgatgtacaatccattgggaatcaacgacaccgattttgtcatgtgcaggagctacacattttctgagagcgaaatcaagaccccatccatgaaccaagtcatgctgaatcatatgccatac

SEQ ID NO: 40906 - DNA, 466 bp, Oryza sativa
  Clone ID: uC-osroM202032h11a1
tttgttttagtccacacaaaacggaacaagtcttatttccaaggcaaattaacaaatgcaaacagatttacaaacggaagaaatcaactgcacgctacagacagtatccactaaaattattccgtaaccaaatcaaatgagtagatcagatggttttgttgatgaaagaaaatgcagaaaatgatgggagatcgacggcggccggctacgatcacttgaacttggccttgatggcgtccacctgcgggacgtcgacgcggaaggccttggcgaggacgtcggacggcacgggcggcgcggcggcgaagagcgtggcggcgatggcctgggtgccctggagctggctgttgaaggcggcgatgacggcggcggggccgtggccgcggttctgctggaagtggacgaggccgcgcgggaagacgaagacctcgccggcggtgacagtcttggtgaagagcttgttggc

SEQ ID NO: 40907 - DNA, 501 bp, Oryza sativa
  unsure (1)..(501): unsure at all n locations
  Clone ID: uC-osroM202032h11b1
caatcgcagcgagaagtcaagaagcactcaaccacgcgctgttcgtcatggcgagggtacagctctgggtggccgccgcgtgcgccgtcgtgctcgcgctcgccgcgccctcgctcgccggcgaccccgacatgctccaggacgtctgcgtcgccgacttggcgtccccggtgaagctgaacgggttcccgtgcaaggcgaacgtgacggcggacgacttcttcttcgcggggctgaagaaccccggcaacaccaacaacccggcggggtcgaacgtgacggcggcgaacgtgcagtcgttcccgggggtgaacacgctgggcgtgtctatggcgaggatcgactacgcgccggggggacagaacccgccgcacacgcacccgcgcgccaccgagatcatcttcgtcctcgagggcgtcctcgaggtgggcttcatcaccactgccaacangctcttcaccaagactgtcaccgccggcgaggtcttcgtcttcccgcgcg

SEQ ID NO: 40908 - DNA, 470 bp, Oryza sativa
  Clone ID: uC-osroM202032h12a1
tttgtttttttttttttttttgttttttttcaaatttcagataaacatcaatatatagcgggcacttgttgcaaaaaacttaacttacaattattccaagtccatatgaccttattacacaattgggtcaaaacaaagaaatccatagcatgtaaaccttggggttcacaaatgaggaattaaggaatggtaacaaaagagggagaacataaatgtgaagcaaaagtcacatccaatcataacatcatcaacacgtacgcttgcgacttgatcaaggggggtgtgaaactatcaaaccgggtacgtcgtcatcgttgagcacgtacttcaccaggtaattgaatcacgcagctaaacttgtagattaatcagtagttgatgaccctgcagttcttcctgatctgcccctggtacccggtcttaacctggatgctcgccaacttcaccatggccgccttgaacctgtcctc

SEQ ID NO: 40909 - DNA, 482 bp, Oryza sativa
  Clone ID: uC-osroM202033a01a1
gcgcgcgcgagcgcgagcgcctcgtcgtcgggctccagatcatcgtgcacagccagcaccaccacggccggcacgcgcacgcgcacgcggcgagcgtagtgctcaagcagatggtccggccgcgcgccgctgccgccgccgccgcagggcgccacggcgccgtctcgtgcagcttcctcaaggcctgctccctgtgccggcgtgagctcagccctaccaaggatgtctacatgtatagaggtgaccaagggttctgcagcgaggagtgccggtggcagcagatcgccgtcgacgaggcgcgggagcgggaggcggtggcggccgcgggccggccggagcggcgaggtctggctcgccaccacagccctcaccgtgcggtggcgcccgtccgtggcaggccaaggaagacactagccgtagcctagagttattactatgtagtggtaaagtacttactgagaagaggagcacgtactactact

SEQ ID NO: 40910 - DNA, 134 bp, Oryza sativa
  Clone ID: uC-osroM202033a01b1
gttgttttttagctcgggcagaccgtcggagaggagagagtccactagagagacatagaggggtccagacttccagagggttctttatgaaccgtatcggagtggaggtcttaggccaaactcacacccaacgg

SEQ ID NO: 40911 - DNA, 471 bp, Oryza sativa
  Clone ID: uC-osroM202033a02a1
tttttggtttttttttttacaaactcaagaagcactccgaattgaaatactcgccattgcttgcagtacgtacagagccgaaattgctacactacccttaagtttgcatgccgtcgctagctgcttatcgatcaatctcacatggccacgcatgagctgatacatagcatcggtgtagtttctcaaccgtgatttgatcagtgagacagtgacatatatatagaacagttcagcgactaaattaaacggtggcgccgttgctcttcccgccattggggacgacgtggtgtttgtcggcgtcgtccatgaagcgcttccagaaccagtgctgcttccacaccctctcggtcatctcctcgaaggggatgttcttggtctcgggcaggaagaagagcacgaagagcgacatgacgacgacccacgcggagaagaaggcgaagatggcgtacttgaggtggcagagcatggaga

SEQ ID NO: 40912 - DNA, 520 bp, Oryza sativa
  Clone ID: uC-osroM202033a02b1
gtgctctcatgcatatgtatggtcttctgctggtaccagcgctattaagccaccaccaccacgtctccttactgcgaaaaccgccatggaaggaagttctgcaagccaggccaaggccttgttcaaagccactcttattggcctggccatcctatccatggtgacttgggtgccacacatgtattcctgcattaagatgttcttggttcaggtcccttccgcggcttacaccctcgcgacaccgaggtgtttgttcatcttctccaacatcatggtcatattcctcgccagtgagataaaactctccgagggggagaggcttcggcgagtgtacgatccagaccaataatggatccgatgcttccatcagatatagggttgaagctttcactccagctaccaagtcaaacgatgtgattgttcaccatgttgctgaagagccagctagcacggtaattgtacatgatgacagcctgcacagctagatcaatgtgaacaagtggttgctttatcaaccatg

SEQ ID NO: 40913 - DNA, 477 bp, Oryza sativa
  Clone ID: uC-osroM202033a03a1
gttgataatagaggtgactatatattccctctaattttatctatttcatatacacataaactaatagacaacatatacaacatgttacctctaataaacaaacccctaattagtgctatcatatttgttatagtgtacatatagaggctacctcttgcacgagagatgcctcatcttctccctttttcatcacttctcttctcaaactcatcacataatcctatttaattaacaatcttagaggcagcacatcaaatttcattacgcttgctctaattctatttcatgagcatggtctgtaaatggatcctttgcctcaaaacatatatttagtagctgcagacaagcatccttgcctcaagctgcctctccatgttgaaccttgcaatgaagtcctccactctacgattcagctcatcagttggcaacccaacatcttcctcctcaatcatttccttctcgattaccttgccttgg

SEQ ID NO: 40914 - DNA, 386 bp, Oryza sativa
  Clone ID: uC-osroM202033a03b1
ctttctcaagagacaagaaagatgctcagacaccttcggatggggatctgtgcatactcagagcagctggagcatgttcatgagacacacgacagcactgtgtctgtgaaggatgagcaaggaagggggggtagggccgctacaccatggccgcggctgccgtggcattggcttcggcgtacatggagcggttctgcgcgctggcgcggcggctgtccggtccacggatgcaaccgctcgtggtgaggctacccagcggtggtgctgaaccgtgcgcgtgtgcacgactggatcggcgacaacctgcgcgccacgtgtgacgccgcgacataccacacgtgcatcctgcctctgccttcctggcgcgtcggcaggggcctccttac

SEQ ID NO: 40915 - DNA, 398 bp, Oryza sativa
  Clone ID: uC-osroM202033a04a1
acattcattgattaacaaggcacacaacatcatacatatgtacatccttatgtagcattgggaagtctgaaatggacatgaaaggatacaacagaacaatgagcaaacttgctaacactacagtagtagtgcagagacatgcatattttattcttgcactccaagttaatttgctcctagctagtagtaactacttctcttgtacttcacatgtaccgatctaatcaggcgtgcgcgctgctaattaaccattcccaaaacactgcgtggttcgctggacacgtcgaagccggcgaggaggctgtccatcacgtcgtcggagcagcactccagcagtatgagcttattgccttgctcgacggacgctaccgtcgacgacgtcgtgcaagcggaggctt

SEQ ID NO: 40916 - DNA, 489 bp, Oryza sativa
  unsure (1)..(489): unsure at all n locations
  Clone ID: uC-osroM202033a05a1
tttgtttttttttctccttggtttctatttcatttcattccgatagatagcaacaagcagttcaaacaccataaccaaagcgaactcaattcatggtaacatcacgggcgaagaacacctaacactggatggatggatagagggcttctcgactcgagagagccactggacacgataacgactcgactcgatgataagatgattctgacacggatagctaaggataactggccacgatgggccccaccaatcagttcctccagttcccgccggagtcgccgccgtagccgccgccacggctgccaccgtagccgccgccgccggcggcacggtcgtcgtcgtagccgccgccgccaccgtagccgccctcacggtgcccgtagccgccgccgacaccttctacgtagccgacgtctacacgaccgccgncgtagacgacaccgtcggcgtcgtagcccccgcctccgccgacggagcggcgggactggg

SEQ ID NO: 40917 - DNA, 435 bp, Oryza sativa
  Clone ID: uC-osroM202033a06a1
aaatccatgaattacttcatgcataaaccgcacgacataatggaatggacggtgaacaacaaaccgaattagatacagaacaaaacgtaaaatacggtagcaaattattcactccctacaatgctccctccatctgatggaaatggaagtcatcagatcggaggcccagaagggaatcctgcgttccagcaattattcgtcaggcgatggactaaaaaggcagagaaacaagaggctggctgattacaatttttcgacagagtttcatctcatgaagagagatatactgctcactcaggcctcgagctggagcttcttgattgtgtcgatgtgcttcgctgggttgaggcccttggggcaggcgtgtgtgcagttcttgatggtgtggcagcggtacagcttgaactcgtcgttgatggaatccaggcgctcctt

SEQ ID NO: 40918 - DNA, 308 bp, Oryza sativa
  Clone ID: uC-osroM202033a07a1
gcatctgaagttcagacagtgcattatcaattacatatacaacaataccatatccctaggtactggagtactggatggataatgttgtgggtcacaggtaattcatgtcccactattttgtttacactgaacattttacactgaaattacatgtatggcactggagactactcatccaattttttaagtaaaagttacatgaatatcaatgtatacgggttgcttggaatcctgattattgggatagaggtgcatctggttggttttgaggatgtgcagcttgaaatgcatgatgttctgggtatact

SEQ ID NO: 40919 - DNA, 457 bp, Oryza sativa
  Clone ID: uC-osroM202033a08a1
tttgtttttttttttttgttttttttttttttttttttttcttttttttttggaacaaataaccaggggcttttggcaattgccaagtgaagtattttcctaaaactggccctgggatttacaatctttcctgaccccaacatggtttacaaataggatggtcacaattttgaacttgcttgtcttgtaaatatccatggcaaatgaagaggctttgaaaagccgggggaccaaacaaggcgaaaaaaggaggggtccttcccgatagcaggggtatgggtggggattttactttaagggcatgcatatgcgggtcagcacacaagggggattgggggggattcctaaacattcgagttcggcaaatttggcagttttgggcttatggagaactttagccacggtgttttttccacgtacaccagaaccgggtgcggtactaacccaaccggattgc

SEQ ID NO: 40920 - DNA, 137 bp, Oryza sativa
  Clone ID: uC-osroM202033a08b1
acgttttctactacgagttaactgataggtggggcctgtcctttctgcgagtcctagcattgggcgacgctgagtggtgctacctgagggacggtgaggggtatggtattagatctgacgcccacggcacaggaggt

SEQ ID NO: 40921 - DNA, 503 bp, Oryza sativa
  Clone ID: uC-osroM202033a09a1
tttgtttttttttttttttttgttttttttttttttttttttttttttttttaaactcattttcatgtgttttgggtacaatactagtgaagtcttttttaaaaaaaaggacggggggaaatccaaaatatccttaaaaacaaagggggataaaccaaagcgcatagaccagacaatttggaagggtcgcaggacaaaaaaaacacccattgtgggaaagagggaggccctaaacaaaaacacggggggaaaaaaacaaaggggaaaaagggcgaatttttcttttctccaaagagggccccacaggggaggggggaccccaaaaaaggccccttttttttgggggggcccaaaattggtatggggaaaaatttcttaaccctaggattaggccaatccggcagatttgggggggggggtatcgggaacaaaaaggctttttgcacaaacaccacaaccggggggggggcgaacaaaactggaagggcaagagggggcccccc

SEQ ID NO: 40922 - DNA, 407 bp, Oryza sativa
  Clone ID: uC-osroM202033a10a1
ggtggttttttttttttgggggcaatgtgcattgaatatgcaatagcgatggaaaacttgcattctacttaatgttgcattccaccggtctatgccccccaaaaacaaacttgaataaaaaaggaaaaaaattccatacaggtccaatgtatagagaaggtgaaatctattaacggggcaatggccaaaaaagacccaaaagggaaagaaaaaaaatattatgaacaccaaatagttgctgtcttctagcacttcctgctacacctccctgcacatccttcgcagcaaccagtcctataaagcatcctgggcaggccggtactttgtcaacaaatctcatcagtcttcagggaccaacgccgatggttgatgcaggcaacaaatgaatctagtagcatgttatgtaa

SEQ ID NO: 40923 - DNA, 328 bp, Oryza sativa
  Clone ID: uC-osroM202033a11a1
gggtaaaaagcccactatttttttatttggggtcgtttttaacaagcagggggatctttgcgggctaggggccaaatggtgaaatcctttttacaagggcctctacaacagggggggacgaaaggtggtaccacgggttaatggtaaagaatagaccccataggcttaagatgaaaacaattccatgtgaccgccgccagtatggtgacatagtacacccatttttggaaagcgggcacaagtacatcactgggacactttcaaatccacctaaaggatgtgcaggcatgtcccattcgtttgaaaccatatttattggatttttaag

SEQ ID NO: 40924 - DNA, 444 bp, Oryza sativa
  Clone ID: uC-osroM202033a12a1
ggtgtctttcgccggcttgtgcataacccacggagtcagcccggcgagcccctgcgccacgtacccgaacgtcgaccacccgctggtcaccagcgcgtcggagaggctgagcaggtatatctccgcccacgccttgccgtcgtgcgacctggcaccgaaccgctggtactcctcgtggctcggctggtgcacgctcaccgcctcgccggtggccgtcgcgtgctcccagtacatgctcttcatcttctcgtagtaccacgacttgagcgaggtgacgagcacggttttggacttggagttcgccggcacgacgtctacgacggggggctctccggcggcgatcacctccgggagcagcttctccttctgcgtgcacgtggtgatctgatcaagcagcttcggcgactccggctgggcgccgaagacgcgcacctggatgccgac

SEQ ID NO: 40925 - DNA, 474 bp, Oryza sativa
  unsure (1)..(474): unsure at all n locations
  Clone ID: uC-osroM202033b01a1
ctgcacctcttatggctctattttcattcggtagggaaaatgtttaggactaacaaatagagacatacgtttgcacgtgcagctgtagcacggatgccataaccactaataatccagtgacacgctgcactcacataatccaattgagaatgaagattagccccaaactgtgtaaatcttaagtccacaaagactgagcatggaaaaaaagtaaggagcaatgaacatagacacgaacagcgcttcttgctttggtcgactatctcatttgaactattccagcgcttacaagcttctgaatcttctgcatcactccagggttcttaagatgctcctgagaagccctagggttctcctgcaaatcgaccagtacctgtcgcatgatgggatctgtaagaatattctggatctctggatcctgcatagccttgttctgtcgntcctgaatctcttcctgagtcaaatcacccctgt

SEQ ID NO: 40926 - DNA, 567 bp, Oryza sativa
  Clone ID: uC-osroM202033b01b1
gctggctggcccgcctgcacggagccgggacttactggctggaccgacccacgcggacgtttcgagctgggctactccggcagcgcggatccggatcccgggcgtagccggcggacggactgtaagaaatggcggcgctcgagggatgcggtcgccgaccagaagtactgtgagcgacacatgaaccggggacagccaccgttcaagaaagcatgtggaaggccagcctggccatgccgcgaaagcgatgcccgcggcggtggcagcagccgctgcctctgctacccagcctagtgctccggccgcccacagtggcggagctgttgctggcctcgctattaaccattagcaccagcaaatgaagaactacgctgccaacactgccaatccttgctctctgcaatatagcagggatctggcaaacaagcataatgagagtgaacaagtgcaagactcagacagtctctcgatgctgacttccattagcacgagaaatacgggcaggctgtttgcgttttcaaacaacataatccttttgaagtggtcaacttaagggcagattttggc

SEQ ID NO: 40927 - DNA, 446 bp, Oryza sativa
  Clone ID: uC-osroM202033b02a1
acaaccaaggcaaggatcgctttacattcagcccggattatgccaatccaggatggggtattttaagaaggtatgccccaatggagtcccaaatccatccataccacacgttatatcacgtcaagatccaaggggaaggttccaaagcaaaggaaaaataacagagcagaaataccaaaaacacaagattagtctgaatgacaaagcaccgagggaaatgctcacacttgaagacgtcataacgatatgtaacaaggggaagactgattgaatcgtttcctcatgcctggcattttggtgcattttttggtgatcaagaagcttacaccaggcggatgcttggatgatttacaacaactgaaccgagatcatcccgcaggttactggtgccattataaacactatgattcttcagtctaggactgctttcggggctactggatact

SEQ ID NO: 40928 - DNA, 479 bp, Oryza sativa
  Clone ID: uC-osroM202033b02b1
ctcactttcaataacttgcaaggataactcaaactacttgaatcagatcagacaaaaacatcataagaatatcacgatgtgtggaggagcactgatcccgaacgactatggcgacaagccgccgccgccgccgtcggagtcgtcggagtgggacgcctcagcgaagacggacaatgaagaataagtgacagtggtaaccggcgacgtctagttgggggcactgcctatgttgtcactttttaacagcatattgtgcagagtttctaaatttgcaaggcagtccccctttcaagattgctctagatctcaagagtatacttgccaaatgccctctcaaccttcttgttgaagtgttcgatccggtcattggtcgagtaaaagtccctggcttcagggaacctgcgccttcctgtgaaatgttttccgtttcttattccggccctttaagctaataaaccattcctgtttatgattacttt

SEQ ID NO: 40929 - DNA, 402 bp, Oryza sativa
  Clone ID: uC-osroM202033b03a1
acattcattgattaacaaggcacacaacatcatacatatgtacatccttatgtagcattgggaagtctgaaatggacatgaaaggatacaacagaacaatgagcaaacttgctaacactacagtagtagtgcagagacatgcatattttattcttgcactccaagttaatttgctcctagctagtagtaactacttctcttgtacttcacatgtaccgatctaatcaggcgtgcgcgctgctaattaaccattcccaaaacactgcgtggttcgctggacacgtcgaagccggcgaggaggctgtccatcacgtcgtcggagcagcactccagcagtatgagctcatcgcctcgctcgccggacgccaccgtcgacgacgtcgtgcaagcggaggctctgtc

SEQ ID NO: 40930 - DNA, 401 bp, Oryza sativa
  Clone ID: uC-osroM202033b03b1
attgttctccacttaactttcttgcatgcaaccttccagaatataattaatcaaccatatcggatcgtacgtgtataacaaacaaacacacagatctaacaacaagttgcatatcccttctaggattacaacacgcaaaaaatagaaacaaaaaatactgacccaatattctgatcaacccctttctactactccatgattaacctctgttgattaccactcaaattaactctcttatcacatcttcttcttcttatgcatgcatacacatatgcaaagtccttctgttattgacatacctggctaataacttcctctcaaagttctccatgaacagtagtagtacgtgctcctgttctcagtaagtactttaacactacatagtaataactctaggctac

SEQ ID NO: 40931 - DNA, 381 bp, Oryza sativa
  Clone ID: uC-osroM202033b04a1
tttgtgtttttttttttttttttttttttttttttttttttttttttttttccaacaatcaacaccataattaatttttacctcccaaaaaggcccaaccccaaattaagtccgtagcaaaaatttcccggaggggccccggtttttgactggaaaattttccctaaaaaacaaagcctgggttaccataccataaccaattttaactaaaaggaaaaggctaaaaattttggaccctagaccggaaaaagctttttaatctaaaatttaaatggaccaaaacaccgttttttggtaaagggaagcagtttaaggggcctgacaagggggttttttttgggacccaggaagggacaggggtacacaaatccagcctggggg

SEQ ID NO: 40932 - DNA, 422 bp, Oryza sativa
  unsure (1)..(422): unsure at all n locations
  Clone ID: uC-osroM202033b05a1
aattcaaaaagactgcccaaacagaccaagggttttatcatagcagcaaagttttttaacacgcaacatcaaagagacactaatgcaataagataacttgaagcgcggatcactagcaaatttcgcgcttagtcgacctccttgatcttggggccagcaccgttgccgcctgccgggggagcattggcctcgtccatgccgccggccatgtccgcgccagcgccctggtacattttggcgatgatggggttgcagatgccctccagcttcttcattttggcatcgaactcatcagccttggcgagctggttgccgtccagccactggatggcctgatcgatggcatcctcgatcttcttcttgtccgctgccgggagcttcgaggcgatcttctcatccttgatggngttgcgcatgttgta

SEQ ID NO: 40933 - DNA, 249 bp, Oryza sativa
  Clone ID: uC-osroM202033b05b1
ctcgagcggaatccccctctctccggctaaacctcgccgacaaggagaagcataagtgcctccctgttcgacggcgccggccatcaacgtcgaccttagcacgacctactcgagcgtgggcgtttggctgcacgaccgcgtggagatcatcgtcaacgaccagggcaaccggaccaccctctgctacgtagagtccacggaatgcgagaggctcatgggagatgccttcaagaaccagtgcgacatgaa

SEQ ID NO: 40934 - DNA, 490 bp, Oryza sativa
  Clone ID: uC-osroM202033b06a1
tttgttgttagcatccaaataatctgcccacagagattctgctctgctgtgtttgcactagcttaccgatttgagtcgatacagtaaggtaaaagagtcgcacaagcacttgaagggtacaagcctgggttccgcaccagaggatataaccaatatttgaaaggaacattctaaatggacaagaaattagaaacctactagagttattacaggactgggttacacagatagtcacacgattcagctccttggagcacagctggccaagtgagtcttgaagttctccagctctgcaagaacttcatcttctggacggtatatcaggtcactcatgcgccatatctgcaatgttccacctccaccagtactctcaccatcatcagacacactcacaatagtccaaggatccgaagaattccagtggaagtctacaatcttatccctatgaccagcatgttgaaagaaaagcccagcaggtgcgttgggattt

SEQ ID NO: 40935 - DNA, 508 bp, Oryza sativa
  Clone ID: uC-osroM202033b06b1
ccggctggacccacgcgtgcggtctgtcttttctgagcgggagccacgcgcaagggttcagagcaaacgctcctcatacgacagagagagcgtgacagcgcgagggggttcggaggcgggagcgggcgacggcggcggctgcaggcgccagcgagcggcgaagggcgcgctggagatgaaggagaaggggtcgagggcggcggtggacgagcgctacgcgcagtggaagtcgctcatcccggtgctctacgactggttcggcaaccacaaccttgtctggccgtccctctcctgccggtggggaccccagtttgagaaggctacctacaagaatcgtcagcgtctttacctttcagagcagacggatgggactgtccctaatactctggttattgcaaattgtgaagctgtcaaaccaagggttgcagatgctgaacatatatcttaggttcatggggaagcacgatcaccttttgatagaagtcaagactataattcattcaggcga

SEQ ID NO: 40936 - DNA, 466 bp, Oryza sativa
  Clone ID: uC-osroM202033b07a1
cgcaacttaaccctttatccttgcattacagatttacagactaaaattcttcttttacactgagcagcgaatgctttgtcatccggatgtccttgtgatttccagagctcaacattttgcagatgtagcattcctgatctgcatgtctgggtacagtttgtgacactgtaccgtgggagtttgcaggatttctagctccatggagtaatctgtttgacgcttctgcggatgcttgcccacaggtgcgaagtgttcacgctcgggaggctcttgttcctcttgaaccgcgtgatcctcaccgtgctcttggcgccgcactcctcgccgtcggcctccggctccgggtcgccgtgcccgtcagccttcctccggtggtcgtcgtcggcgaagtaggacatcgacgaggacgacgaggatgacgaggaggaggacgacgacgccggagagcggcacgacgcgttcagag

SEQ ID NO: 40937 - DNA, 491 bp, Oryza sativa
  Clone ID: uC-osroM202033b08a1
ggtggaccgcaccgtccaccccgactgcatcaacgcctccaacccctaccacgtctgctccgagtactgcttcaagaggatcgccgacgccaaatcagggttggagcgtgcggagcaagaaccgccttctgcagacgctggcaaatccgatgctgcccaagctgagggtggtggtggtgatgatgatgcggagcaggaggacgccggctcagacgacggttacccgcagatgacagagaagcagaagaagctatttgagttgcggctgaagatgaatgaagctaggaaggcaaatcagcaagcgatggtggcagagaagaagaggatggagcctcgcgctgagagtagaggtgtttctaaacaaaagtggctggaagacagaaaaaagaagatcggaaagcttcttgactcaaatggcctggacatgacaaagtcttacatgctcgatacacaagaagtcgccgaagcgaaatacaagaagtgggaaaagg

SEQ ID NO: 40938 - DNA, 112 bp, Oryza sativa
  Clone ID: uC-osroM202033b08b1
tttattccaaccagagagcttgtgtaagcgggggtttggtgcggtcgcgcgcacgtgatggggtagaagatttcataatattattaattaacacatatctatattctaattt

SEQ ID NO: 40939 - DNA, 472 bp, Oryza sativa
  unsure (1)..(472): unsure at all n locations
  Clone ID: uC-osroM202033b09a1
gaaaagctcatggaatccctttattatttagtgtgtcaaaggaaacagcagcacaccagtctcggctctagtattagcaaaatgaaagttacagcattgccgcagcggttgcgaaagaaaatcagcacattctggttccccagtgtgccagggagctcgaagcagactgttaaactcgttcaatccagcgtcaagagtgagtaggtcagaggagatctcatctcttccaccgccgagcttgctatcttgagtccacaacagtgccctcaggaagcgcagacaggtgtacgagagcgtgagatttttgtgggctatcggagccagngatcttctccttcggccggctcaacaccttcctgacctcgttagctagctcgatgattgaatcatcttcatggcatatgttggacaatgccttctccattgagaacaggtaatccctgttattcccattggggccattggctgtagc

SEQ ID NO: 40940 - DNA, 359 bp, Oryza sativa
  Clone ID: uC-osroM202033b09b1
acctaccccaggaagatgaggaggtggggtggccatgactgatgggtcacaagtatctagaccaccgtatgcagctggacccataactgatgcttgtactagaacggttaagaattcaacatgtgagatatgccattggattgccttgcattgacctgtgactattccaacttttaggaaaaagcatgaatcatattgaactcttgagctgtcgcatgaatatgtactatccatgtttactattcgatgattaagcattgttcattaccactcaaaataactttgcttactacatctttcttcttttttatgcatgcatacacattatcaaagtcctttttgtattgacatacctggct

SEQ ID NO: 40941 - DNA, 457 bp, Oryza sativa
  Clone ID: uC-osroM202033b10a1
ttgttttttttttttttttttttttttttttttttttttttttttggggcgcagggaaagatcattcgctcaatatcaatatttctgggcatttgggcttcaagcaaaggggaaacagaggggttcaagggtccctggaaattttttccgatttaaagggctccaaagaaaggattagggatagcagaattcagctcggctccagcagggttcaggacggccttggcaaccttggcccttgccaagaacaagaactcgttgccttcaagttttttaaatccacagagctggagaaactttatgcctccatgcagattgccaaccctttcctgaaatgtagcgttggacagtctgatcttcctgaatttctcctcggcaggatttttagctacattgccaatgtaggtaaggagggtttgaaaagcccttttcactttagcatcgccatccttggtct

SEQ ID NO: 40942 - DNA, 125 bp, Oryza sativa
  unsure (1)..(125): unsure at all n locations
  Clone ID: uC-osroM202033b10b1
gagctgcccaccttcttttctgtnctggaattcattaccctgtgcatgcgcacatccagctagctaagatgagtcctaggctacagcatctggccgatgtgcagttggagtctgactctttagtt

SEQ ID NO: 40943 - DNA, 439 bp, Oryza sativa
  Clone ID: uC-osroM202033b11a1
ggaaaaagaatacttttcattcaattcatacttatgaaaagaatttatgaagagtagttacaccaaggtgtatcacagtactgaatacatgagtatactcgagagttcagagtaaccccgcaaaaaacccaacaacaatcgctctcaagttgtcttgatccaattagctaaacccacgaaagaatcttaaatactgtcaagaacgacattccatcacagtctaaaccgaatccagaacagtactaatcctaggctaggcaaactgccggagggcgcagagagacacgcccaagctgctcggatgcgtacttcctgtatgccgtcttcagcttgctctcaggagcggcagcatgagcgttgacaaggaccttcgcacactccctgagctgtgattcggtgaaaccggtgtggtgcttgagcgtgctcgttcagaggggac

SEQ ID NO: 40944 - DNA, 375 bp, Oryza sativa
  Clone ID: uC-osroM202033b12a1
gtttgttttttttttttttgtttttttttttttttttttggaccaaaacttgttttactgaacatttggagggctgatccaatatacaaccacatcccctagggggggactaaaactgaattcaatttacagttctatctgggttttacattttggatgtcacacaagaacttgattggctattttttgccatttcggtattagaaatgcagggcaatatgcttaacttttccattgtttactatttccataacacttacacttgacataagattgcttaaaatacgcagttaaacacaggaggctttaaaaaagtgttaaaaaaaggggtttccaccaacttggggcaaatgactttggttgatggggaaactg

SEQ ID NO: 40945 - DNA, 156 bp, Oryza sativa
  Clone ID: uC-osroM202033b12b1
cttcatcagagttgtcttggaagcatatagctcttggaagtcggaggaccaccgccggttcgttgttgctgcggatcgaatcgcggagcagagcacggggtggatggggagcagggtgaaggaggaggagaggttctcgcgggccctgccggccca

SEQ ID NO: 40946 - DNA, 424 bp, Oryza sativa
  Clone ID: uC-osroM202033c01a1
cgaaaaaaaaaattgtccgtgcaaattaacaaatgagcaaatcccaaactggcttaagctagctagtaggctagtagccgtggcatctggacatgatgggcgggtcggcgaacgggccgtcgagcacgccgcgcgccatgatccggtacaccgcctccgtcatgtgcaggccgtcccacgagatgcgccgcgacgggtccgcgcactgcgtcgcgccggggtcggagcagtgcacggtgaagttgccgttgtacggcccgccgccggcgcagaacgcggtcagggcgtcgtcgaacccgctcgccgcggggttcgacacgagctccatcacctcgccgtagtagtcggcgtaggcgatggtgacgcccgggtgcgcggcgcggagctcggcgaggcggcggcggaagagcgcgttgtggagggc

SEQ ID NO: 40947 - DNA, 506 bp, Oryza sativa
  Clone ID: uC-osroM202033c01b1
agctaaagtattttacttcaataattcaagacaactcaaacttagttggcacacatgtactccaccccctatcactagagttgttttcttttttgtacaagatcatcctaacattcccacaaggacataaagaaacagcagaaccttcccgggaaaatttcactgagacaggtgcattccgtgcacgtacaataatcatcaccatcatcgtatgatccaacctacaggaaaacgcaaattcaaggtactcttgtccaaacctgtaggtggccagtgatttgctcccatcggctacaactaccagactcaaaaaaactagacacaggtatgatgctaataagcttagcatgatcgactgatggacagacagtaataacaaataggaaacggagggaactatatgtgtcaactcgatgaactctataatatatggatgatttccagcgcccttctggcaaaaataacgtcctcgtaaattattgtcaccatcttaaaccacttgaaga

SEQ ID NO: 40948 - DNA, 495 bp, Oryza sativa
  Clone ID: uC-osroM202033c02a1
gggaaggacggcggcgccgccagcgagtacctcatcgaggaggaggaggggctcaacgagcacaacgtcgtcgagaagtgctccgagatccagcacgccatctccgaaggagcaacttctttcctcttcactgaatacaagtatgttggactattcatgggcattttcgcggtcctgatcttcctcttccttggatctgttgagggattcagcacaaagagtcaaccttgccactacagcaaggataggatgtgcaagcctgcccttgcaaatgctatcttcagtactgttgcctttgtgcttggtgcagtcacctctcttgtatctggtttccttggaatgaagattgcaacttatgcaaatgccaggacaacccttgaggcaaggaagggtgttgggaaggcattcattactgctttccgctctggtgctgtcatgggtttcctgcttgctgcaagtggcccttgtgttctttacattgccatcaacttgttc

SEQ ID NO: 40949 - DNA, 396 bp, Oryza sativa
  Clone ID: uC-osroM202033c03a1
aaaccaatgatacctgttcaaaacatgttatagatacaaagggaaaaaaaacattccaccagtaaccaagcacacgcttattacaattttaattaacaaaaagaccattgttctgatataggtcacattgttcttcttacatacagaaagcttattggattaggaggaacacaatgacacagatgcgcacaagacctatctggctacatgcctagattagtgaagggtaaaaccaagagttaaacaaacagtactgaaattacagtcatcattacctgcattatgaccaacatacaacaaacactgaatcagtattgactgaaacaatccaagggtaatgttatagctcctagatcaatcttcagatgcttcagaatatgacacacggggagagga

SEQ ID NO: 40950 - DNA, 407 bp, Oryza sativa
  Clone ID: uC-osroM202033c03b1
ctccctttctgcctgtcctccggccccgccgccagagcccttgcagaagcttccggagcccgcgccgacgatctgatcgccgtcgcgtgccatggccgacgaggcgaaggcgaagggtaatgcggccttctcggccggccgctacgaggaggcggtgcggcacttcactgacgccattgcgctcgccccggggaaccacgtcctctacttcaaccgttccgccgcgctcggcttggtccaccgttactccgaagggctcgccgacgcctagaagaccggcgagctgaagcccgactgggctaaggggtactcccgccttggagccgtccacctcgcttcggggggcagccagagcgccgtatttcgcctacgagaaggggtttcgtcctcaacccccacccaccgag

SEQ ID NO: 40951 - DNA, 437 bp, Oryza sativa
  Clone ID: uC-osroM202033c04a1
ctgtagcagtatatattaatctgtcgcaactcgcaacacatacaaaatttacaattcatcacaagctgaaaaggagaaagaacaaaggaaaaaaaaactgaaacaaacaacaccctcatcaatttacaatctaatgatgactacttgggcttgacctcaaaatagggcatgtaatccgacgcgccatcgccggcgtacgatccccggctgatctccacgtcgctgtaggggtgcgccggcgggccgacaccgccgaggtggcggtcgaactcgttggcggacgggtcggcggagctgtccccctccccggcgccggcgtcgtcgggctcgttctgcagcatggcctcgatctccttcaccacggcgcccatggccgggcgcgccgccgccgactcgtcgacgcaccgcatcgccagctgcacgaaccgtcggaacac

SEQ ID NO: 40952 - DNA, 503 bp, Oryza sativa
  Clone ID: uC-osroM202033c04b1
tctctgacgcactcacacactcagcttaagcgagcgagcgagtgaacgagagagagagacagagatggcgagtgttgcctccttcccggtgatcaacatggagaacctggagaccgaggagaggggcgcagcaatggaggtcatccgcgacgcctgcgagaactggggcttcttcgagatgctgaaccatggcatcgcgcacgagctgatggacgaggtggagcgggtgagcaaggcgcactacgccaactgccgggaggagaagttcaaggagttcgcgcggcggatgctggaggccggcgagaagggcgccgacgtgaagggcatcgactgggagagcaccttcttcgtccgtcaccgtcccgtctacaacctcgccgaccctcccgacgtcgacgaccactacaggcaggtgatgaagcaatttgcgtcggagatcgagaagctctcggagagggtgctggacctgctgtgcgagaatctggcctggagaagggtacctg

SEQ ID NO: 40953 - DNA, 455 bp, Oryza sativa
  Clone ID: uC-osroM202033c05a1
gaaaaaaaatgaagtttattcatatgatcatgatgagcacgtacttggagaaaactttgttacatacatgcatggctcgctatataaacaaaacaattaattaatgaagtgattgaaatcaagaaaaaaaaagaagggacaggtaaatcttacgataatgatctacatggaaattaattataagatggtcacggccggaatcaaaagctgaaatccataatcacagtctcggcgagcagctgatgatatatgacgataattaagagagatgattagttaaccacgttgcacttcttcctgatctcgccctggctgccggtgagcacttcgacgccgcccatcttgaccatggaggcggcgaagtcggcgaagaactcgtccttgtagccgccgccggcgtggcgctgcacgtaggcgcgggtgaagccgttggtgagcagctcgccgtcggagtg

SEQ ID NO: 40954 - DNA, 360 bp, Oryza sativa
  Clone ID: uC-osroM202033c05b1
ggacgggaaaccgaaattttactactcgttagcacgggaaacccaaccctaaacgaagctactggttgtagccgaagtaaccagaaaaaatcaaatcaagacacgaacttgatagatacagtaggacgatggcatgcgatgggttggtcgggaggtagagacttttattacgccttggtgggcagcaccggcacgaccaagtgctgcgcgacaatgcggcgctggatcttgccggtggccgtcttgggaagctcgtcggcgatgtacaccttcttgggcaccttgaacgcggccaggttcctccgggagtatgacagcaccttctattacccgagcgacacgcccttccggggtgatcac

SEQ ID NO: 40955 - DNA, 462 bp, Oryza sativa
  Clone ID: uC-osroM202033c06a1
ggtgagaaaaaaaaactggcagtgttatctccattgctaaaggactaaaaaaaactttgctaaaggactaaaaaaagaagacatatgccgtctggtaagattgccaacttggctgtttatttcgagcagatactctccaaatacttctccacgttgtctaagccgcatagctccttcaccgtgggcatgatggcaggaacttcaagatcaaagaagggaggtgaagatccagacctggaacagtgatactcctcccttgctgctctaattgcttcccttgttgcacaatgcaccgaggcagcaagtagcaaaggtggctccccagaagcttttgaagagagcacacgtttcttgtggaatccactgttgagtagcttaacgttgaactgttttgggatggtgtccaccgtaggaatcttgtatgtccaagtcccgtctgagacaagcagcccatctgagttc

SEQ ID NO: 40956 - DNA, 407 bp, Oryza sativa
  Clone ID: uC-osroM202033c06b1
tttgttttggtattcccatacactttgtttctcttccccgtctcgtggtcgtgagaaaccgagaggagagagagggagaggagcgctgccgattttccggagggggagatctttttcttctccctgaaggttcgagatcgatctgcgacgaggaggatcgtggaatcgtaactttatttccgaggaaatttcatcaaattgatgcactaatggagtccaagggtggcaaaaagaagtctagcaggtagtcgtatctatctgatgtacgatgctcccctaggctacagcattgatgtcctgcgacctgccggtggcatctagaagttcctgctctgctgcttactccaactgagcgaggaagccctttttgtaatccccctttgtttaccttgacctaagttgtttag

SEQ ID NO: 40957 - DNA, 509 bp, Oryza sativa
  Clone ID: uC-osroM202033c07a1
gacattatagaagagctacgacgatggatcgccctccgtacgtatgggatgcctcttgttgggcggccgtccttttttttttttttttttaatttatgcacacagtgtcacatatatatctcacacagtacatgaatatatacagagtacagtacatgaaacaaaccgacactgcagtcggaaaaaaagaaagaaaaaataaataaaaataaagccaattaaccacaaacacatacatacacgttgcggccgtatgcagatgcaaagaagaaatacttattagaagcgagcaattaataattacgtatacgcacgtaaatacggtcgtacgtatactagagctcgcagacggtacgtacgtacgtatactgatagtctgatgtacgtatatatgcatgtgataatagtacaagtttcgtgttaattacccgcgtcaccgattaattagtataattaattaaatagtcgctgctgtggaagccgaaccttttgtcgaagaaatggccgac

SEQ ID NO: 40958 - DNA, 347 bp, Oryza sativa
  Clone ID: uC-osroM202033c08a1
cgaaaaaaaaaattgtccgggcaaattaacaaatgagcaaatcccaaactggtttaagctagctagtaggctagtagccgtggcatttggacatgatgggcgggtcggcgaacgggccgttgagcacgccgtgcgccatgatccggtacaccgactccgtcatgtgcaggccgtcccacgagatgcgccgagacgggtccgcgcactgtgtcgcgccggggtcggagcagtgcacggtgaagttgccgttgtacggcccgccgccggcgcattacgcggtcagggcgtagacgaacccgcttgccgaggggttcgacacgagctccatcacctcgccgtagtagtcg

SEQ ID NO: 40959 - DNA, 404 bp, Oryza sativa
  Clone ID: uC-osroM202033c08b1
gttatgaggaacatgttactctgatcaaggagtaccgtggcaagattgaagctgagctgagcaagatttgcgatggtatcctgaagttgcttgactcacaccttgtgccctcatctactgctgcagaatctaaggtgttttacctcaagatgaagggtgattaccacaggtaccttgcggaatttaagactggtgccgagagaaaggaagctgctgagagcacaatggtggcttacaaggctgctcaggatattgctctggcggatcttgctcccacccatcccataaggcttggactggcacttaacttctctgtgttctactacgagattctaaactctccagacaaggcttgcaaccttgctaagcaggcgtttgacgaagccatcttcgagttggatacc

SEQ ID NO: 40960 - DNA, 415 bp, Oryza sativa
  Clone ID: uC-osroM202033c09a1
ggacgacaactttaaatattgctcaataaaacactatctggagacaacacacacgagagtcatatccagaggaaaacaatcagcccagacggaccactagcaccaaatgcaaagcaatgggaagaactaattcgaccgctaccaccctagtaaaaaccagagaagagagaggaaggggggacaggaagaaaaacattctagtagaacaggagaagaatccatccatcatggtgacagcagcatgaggcatctaaatcgatggtctccaataacatgcggagccatcgatcgatcgatcttcccattttactggccctcgcaggcgtcgcccttggaggcttctttcacctcatcaccaccgtcctccgtgaggtcagaggtccagagggtcaagttgtccctcaggagctgcatg

SEQ ID NO: 40961 - DNA, 492 bp, Oryza sativa
  unsure (1)..(492): unsure at all n locations
  Clone ID: uC-osroM202033c10a1
gcgcctcgccgccgatgcgggcgtgctccccggccacgtcgtcgcgctcgccttccccaacaccgtcgagctggtgatcatgttcttggcggtgatccgagcgcgcgcggtggcggcgccgctgaacccggcgtacacgcaggaggagttcgagttctacctctccgactccggggcgcgtctcctcatcaccaaccccgagggcaacgtcgccgcgcaggcggccgcctccaagctgggcctcgcccacaccaccgccagcctcaaggacgccgccggccaagtccacctcgccggcttccccgnctacgccgccgncgcggtcaaggacttcgccaacgacccgtccgacgtggcgctgttcctgcacaccttcggcaccacgagccggcccaagggcgtgccgctcacgcagcgcaacctggcggcgtncgttcagaacatccgcgccgtgtaccgtctcaccgaggcggacgcgacggtgatcgtgct

SEQ ID NO: 40962 - DNA, 476 bp, Oryza sativa
  Clone ID: uC-osroM202033c11a1
gacaatgccgacattattataaaatgacttgtattatattcccaacattaaagtttgatattcggatacattttgctcactgtggcagacaaagcagaccacctagagcccttttattcagaatatatgcaagataataaagaacattggtcatagcatatactagtactatatgaatagtctggctggctgcttcacaaagtaacagagtgatcgctactggagttttgagtattctttaatcttcagtgcgcttccctcatcagcagctcctcatcttcttaccctctgtgccatctatctcctcgacagcatcgtcttcccagtagagagcctccattttaccagctttctccgtgttttcatcagcaaagcaatgcagaacagatcgtggcgacccggtggcgatttcagcagtagcagtgaagctctggtaaatgagcaaacccccagaaggcagctcctgctcaaccatg

SEQ ID NO: 40963 - DNA, 454 bp, Oryza sativa
  Clone ID: uC-osroM202033c12a1
aaaaaggaagagtaaaaaaaattcattctcattgggagaattcaaaagagccacctggtaatcaatggaaccagcaacacaataaagtgatgatgaatccatcgaccacgactcagtgtggaaagaagaagaagaaaatggaaaagatatggcacccaaatgattggtccatagatcagaagagaaaggttaaaaatggtgaaaagatcagaagcgcttgtaccttagcccaatgctttgtcttgtcgaaataggtacaacaccagcgtgcagacgcacgaagaagaaatttgaaaatggaacgctctcaaatcatttgctgggatgtgtaacgcttctgctagatgagggttctatcagacgcgcatggcttagaaaaggcgggccagacgagcgaagaatccggtgggctcgggcttagcgggctcgttgggggcagaagaagcctggccac

SEQ ID NO: 40964 - DNA, 346 bp, Oryza sativa
  Clone ID: uC-osroM202033c12b1
aacggttctagatgagaatcggattcctcctccaccaccgccatggattcgccgccgccgccgcgggaggaggtggtggtattcgcggtcaacagcgagcgcttcgagctccgccgtgacgggggcgaccccggggagtccctcctcgagttcctccgctcccgcacccgcttcaccggcgccaagctcggctgcggcgaaggtgggtgcggggcgtgcgtggtgggtggtctcggtttacgacgcgtaggccgaccaggaagcgcccggcgcgggcagatgatgccataccttgaggcacgctcccccacatcgcacgaggacgacctcacagtgtgtattgagc

SEQ ID NO: 40965 - DNA, 382 bp, Oryza sativa
  Clone ID: uC-osroM202033d01a1
aaatagaggggaactagctaacattttttataacattattcattaccatattaaggctgctgttagaaaaaaaacccgataagagtctcacacaaagcacataatgttaagaatgggaaagaccgaatattcacacagagaaggttaatcaattcttagagctagataataacgaaggtcttgctccatcccattcgccactttgacacatgccacggatgctcggcctcggcagcctacctcacttggacttcaggatcatgttgttctcgggggacaccccaacgcaggccctcatgatgttctgaaggattgccctctggtttgccagggatttcaccactggtgtgccaggaggaacaaggggagccttggtgaggta

SEQ ID NO: 40966 - DNA, 485 bp, Oryza sativa
  Clone ID: uC-osroM202033d02a1
acaaaagacgaacttggaatttaaatagaatacaggctgatagtcacatatccagagcatgatctggcagtagaaatccccagaaatacagtacgggctactcttcgcctaaagattttacttctaacaacagctcaaattgatgaacgctaggccaagggaactctgcattctatcttatcctgcgtattaccacatcgttactgtagttgccttgccagggtgctgcgccatgacaaaactccattggcttctcttaaactcctagcccttctgtactcgatttctgcatctgaggaagatgactgtccaggctgaactttcttcctgacttctatgggttttagagatatttcatccatcgcctttctgaaaggatgacaatctttcacgaccccttcatcctcagatagatcccctccttttgttcctttgaatatgtccaagtgcaccacattatgtggagagtcgttggaaagctggta

SEQ ID NO: 40967 - DNA, 417 bp, Oryza sativa
  Clone ID: uC-osroM202033d03a1
ctcagttccaggctcagcttcatcagccacattggaaggcttgtccaggtccattgcttcgccgtcagcttcagctttagacttctttttcttacttttcttggcagatgcatcgaccttctcgccatcatcaacatcatttgtggcatcattaaccatgctgtctatcgcagctttcatcacatcaaggtttttacgaggtgcaacacccttgtcatagaagtctaaccgctcctcaacttgctcacgaagcttttgcccaaagactgcggtagctgactctgaataacaatcaatgcgtgatgcaatggagcacttgttcgccagatatctagccattctgcctttgttcttggttgaagcacggccaatgaaggatgagtggaatataaggccatactttggcgtattccccct

SEQ ID NO: 40968 - DNA, 386 bp, Oryza sativa
  Clone ID: uC-osroM202033d03b1
gcgtttagtaggaaccatggcgactaggccggcgcggttgtctgctcccgcagaggcggatatacttgtcgccttcttagccttgtgcgcagccacggcgtcggcggcgaacgttacaacgactactgcaacggcgccgagcggcgggtgctacagacacctgttcaccttcggcaactcgctgatcgacaccggcaacttcatccactactccaccttgccgggcccggtcgcccgctccccctactgtgagaccttcttacggcgccccaccggccgatggtcctacgggcgactcatcgtcgacttcattcgtggagaggctgtggttcccgtactggacgccgtactaggccgggaagagcacggaggactttcggtacggc

SEQ ID NO: 40969 - DNA, 445 bp, Oryza sativa
  Clone ID: uC-osroM202033d04a1
ctcaggtccaggctcagcttcatcagccacattggaaggcttgtccaggtccattgcttcgccgtcagcttcagctttagacttctttttcttacttttcttggcagatgcatcgaccttctcgccatcatcaacatcatttgtggcatcattaaccatgctgtctatcgcagctttcatcacatcaaggtttttacgaggtgcaacacccttgtcatagaagtctaaccgctcctcaacttgctcacgaagcttttgcccaaagactgcggtagctgactctgaataacaatcaatgcgtgatgcaatggagcacttgttcgccagatatctagccattctgcctttgttcttggttgaagcacggccaatgaaggatgagtggaatataaggccatactttggcgtattccccctagttttcaatgcccctgaaagtgccttt

SEQ ID NO: 40970 - DNA, 373 bp, Oryza sativa
  Clone ID: uC-osroM202033d05a1
aactcgcattttttttacagggttgatgataacagatcacacttatttgtagttgatagaaagaatcaccagttgttattggacgacattttacaaccactgccaaaagctacatacaccgggacacaattttgccgaagcattttagaaacaaactagctcgatcttatgtagccataatatacctggaggttctttggttttttttggggagttctttgtctgcttttttcctcaacatgacaatggggtcatggacgggaaattttccttttttatggttagttaaaaggtatctttcggtggtaggaaaacttcaagaacgcgtgcattataaaaatggtctgggatggacagggttttttttattttt

SEQ ID NO: 40971 - DNA, 291 bp, Oryza sativa
  unsure (1)..(291): unsure at all n locations
  Clone ID: uC-osroM202033d06a1
gcgcacgccagcctcgacgcgctggtcgccgacgtcctcctctccggtggcaaggctcggtaggacaacgtgcactagtgccgcctgttgcatgctactccctccctcccataatacaagagattttgagtttttgcttgtaaaaaaaaaaaaaaaaaaaaaaaaaaaaaaaaaaaaaaaaaaaaaaanaaaaaagaaaaaaacaaaaaaaaaaacactaccgaacacaaaccatagatttggaccatggaacgcgcagccgtagctagtgaagctataaataacccaatt

SEQ ID NO: 40972 - DNA, 492 bp, Oryza sativa
  Clone ID: uC-osroM202033d06b1
ctgtgctcccggacgtctgttgctttggttttccacagtcaatcaaccacctttggagaccaagctctcgcagcagcgcccagttgcagcaccaagactccttccctaaaaggtccccactccctttttcaaaacaatcagcaaagatgtcttgcacagcaggaggacagatgtacaacgagaccctgtggaggtggagcacacccctcccgtccacaagcgcatgctgtacatcatgcctggtgtgcttgatggtggtcgcccgcatcatggtgggccagccctttgacaccatcaagacacgcctgcaggcgctgggcaagggcacaatcggtgctgccggcatgcccccgaagatggtctacacaagcggcatggactgcgtcaggaaagatcgttcaagggctgagggcccccttttccctgtacaagggcacttgttgcccccctgctgggcaacatggtgctgctgggcaattcactttcccacat

SEQ ID NO: 40973 - DNA, 464 bp, Oryza sativa
  Clone ID: uC-osroM202033d07a1
ggaacggtaaaacaggatcttcgttaatgtattcttgagatgataaattatatagagtacaaattggagaagataaataagagtacaaattggatcgagctatgtacacagatcactgtaagataaaaggcaggcagtagagtaaataagctgtcccctcaaaatgcgacaacgatatatggaggcacggaagcagaaatttcagaaaggctccacgctgcctcatcccctctcctcgccgattacatgttatcgatgagctcatgcggtgttcagcttagcgagcgtgcgcttcaaagccttcacgctcaatgggctgttcttgctcgctgagcaggttccagcccgggtgttgcagacagggtagtcaggcgggcagcagctggcatgatccttgcagcaggttgcaccttcaactgggcaacagccccaaaccaagcagagattcctgaagccgaatgcgc

SEQ ID NO: 40974 - DNA, 491 bp, Oryza sativa
  Clone ID: uC-osroM202033d08a1
cccccccttcggggggtttttttatcagggccaggctcagcttcatcagccacattggaaggcttgtatccagagcatgatctggcagtagaaatccccagaaatacagtacgggcactttttttggtaaaggcattacttttaacaacagctcaaattgcatatggggaggccaagggaactctgcatatcgcagttttctgcgcattaccacttttacgaggtgcatcacttgtcaggtagaagtctaaccgctactcaacattggcacgaagcttttgcccaaagactgtggactcggactctgaataacaatcaatgccctgtgcaggctgaactttgttcgccagatatctagccattcgggatatgttattcatcgcctttctgacaaggaaagatgagtggacgatcccgtcatacttagatagaaccctcctttttgtaatgcccagaagagcacgtgcaccacattatgtggagagtcagtg

SEQ ID NO: 40975 - DNA, 377 bp, Oryza sativa
  Clone ID: uC-osroM202033d09a1
ggaaaccagagacttcactggattttattccctttcgcgccaaagttacgacataacgtttcgttaagacacgaataaacgtcacgaattccaacgttgatcgaattttacatgcacaaaccagcagcagcagggttgggaacttgggacccaaatgatatgagatgagatccttacacacatcgtcatggcaatatggcacgtatatttaggcgaacttggcgagctcgtcggcaaaggcggcggcgtgcggttccttgacgcagcggagcatgaggcggatgccgcgcttgggcgccggcggccggaggtagatcaccgacgcgacgatgttgacgtcgtcgttgagcgtgaacacctacccgggcttgccgaac

SEQ ID NO: 40976 - DNA, 314 bp, Oryza sativa
  Clone ID: uC-osroM202033d09b1
ctcctccacaaattaaaggtatgtggaacagcagcggtagatccttcagcggcagcagctactccaattcctccactgacacctacggatcaggaggacggcagcagcagcagcagcagcagcagtatgaagcggccgccgccggcgacaagacgtcggcgaagcgccagccgccgccgccgtcgcgcctgaagaagaccagcggcaggaacgacgacgccgccaccgccgtcgtcgttggctacgcaacatccggcggcggctacggcgggagcaccaaggccaacgccggagccaactactgtggctggtgg

SEQ ID NO: 40977 - DNA, 378 bp, Oryza sativa
  Clone ID: uC-osroM202033d10a1
atggctctatgtaaacccgggagggaaatggattaggactcacatagcgccacatacgctagcacgcgcatctgtaggacgcatgccatcaccactaattaccccgtggcacgcttttttcacgtacaacccttgagaatgaagattggccccaagctgcccaaatgttaagagcacagagactgaccctggaaaaaaaggaaggagcgatgaacattgacgcgaacagtggttagtgctttggtcaactgtgtcatttgagctattccagcgcttacaagctattgggtgttttgcatgactggagggttcttaagatgcttctgagacgccctagggtttttctgcaaatcgaccagtacctgacacatgatggga

SEQ ID NO: 40978 - DNA, 437 bp, Oryza sativa
  Clone ID: uC-osroM202033d11a1
gaaggtaactgttacaccacgtgcatgttcatgcactagcggtacatatgtacaacatgggaagggactttcaccccggctgcattagcctgggacacactgcatgaacgcacacatgcacaaaccctaccggcaggcacaacatcccgcaccggtttcaagattctggggttgacctttgtgcaagctgagtgtaggagcagcattgcatgcaaccacaacacgcagagctcacaacacctcagcatttctgaacgaaagggatgcaacagcagaacctcaagcacagctgctactgctgctgctgtgcaaaggctgcagcacatgcacgcatcatgcacacaacaacaactcatggttgtcaggaaaatgtacacgcacaacccacccttcaaggggcaccaaccgacacttccacaccatgcaaacttcaaact

SEQ ID NO: 40979 - DNA, 413 bp, Oryza sativa
  Clone ID: uC-osroM202033d12a1
tttgttttttttttagcacaaggcccatctaacgtggtagccattgaagcacagaacaatacgattagagcgcccgttacacacacttgagtacttgacgcgatacttacatccccaggttacgtacacacactagtagtagtctagtacgtaaaaacattacgcagaaaaacacgggacggcatgtacagcaccacgtacactaccgtacacatcccatatatctggatcatggcacgcgcagccgtagctagtgaagtctgatccttatcaagcggtggcgatgggcgccgcgtggacgacctcggcggcggacttcatggcctcgaagcgtggctccttggcctcgaacttgtggcgcacgtacaggttcatgtagtcctcgaacacgaaccttgggtaggcggccgccg

SEQ ID NO: 40980 - DNA, 84 bp, Oryza sativa
  Clone ID: uC-osroM202033d12b1
agtcctgatcgcgagccgccctttttttttttttttggttcttttttttttttttttttgtgttcctccttttttaaaggaaag

SEQ ID NO: 40981 - DNA, 410 bp, Oryza sativa
  unsure (1)..(410): unsure at all n locations
  Clone ID: uC-osroM202033e01a1
ctgacatagggtcatttctgctctggattcgccattgttacgaatagcggaatcatcaacgaaatcacaacgccaacgttgagccctattccaaatgtatcggcaactattccaaatgttgtggaaaggagcagcttttgcagtacagcacattaataaatacgaaaataatgtccaggtaaaaaaaccagccgaggaaaactgcccagtccgtactgagtccaaaccttgctcttgggaaaaaaagcaaattatggcaccagcctttgtggatcgcgagggaaaagtgatgtcttcctgatgttgtttagggcgcagaacagcattaccaccctttncaggccgacaccaaaaccaccatgaggaggtgcaccatagctgaacgattcgatatatgatgaaatagtact

SEQ ID NO: 40982 - DNA, 167 bp, Oryza sativa
  Clone ID: uC-osroM202033e01b1
ctttctcaagagacaagaaagatttcagaatctttggatggggatctgtgcatcttcagagcagctggagcatgttcatgagacagatgagagcattgtgtatgtgaaggatgagcaaggaagggggggtaggggggtggcgagtactacttctctcctattgttct

SEQ ID NO: 40983 - DNA, 409 bp, Oryza sativa
  Clone ID: uC-osroM202033e02a1
gggcacaaaacattactgggtaatggctttagcagtttttacagatacatttttccctgacatatccaggaccaaccattcaccggactgaacaaaatttggtgcccaaaattattaaaaccaatggcccccaaaacaattaattttcctccacaaaactaagggtaaaagggatggaaggactcctggcctgggaagagattatattttgcagtttattttccaagcaaacggggtgccccaggggttgctcccttgaacccgaagttcaattcggcggaatccttttttgaaactcccaaagcctttggttggctggcaaattcagggcccatggaaaccgccatgcctttaaactggggcaaaatgttacttaaaacaaaaaggccaacaacctggtttggctttt

SEQ ID NO: 40984 - DNA, 406 bp, Oryza sativa
  Clone ID: uC-osroM202033e03a1
gggcatagagctcccaacgcagtttttcaattcaaaaagactgcccaaacagaccaagggttttatcatagcagcaaagttttttaacacgcaacatcaaagagacccttatgcaataagataacttgaagcgcggatcactagcaaatttcgcgcttaggcgacctcctcgatcttggggccagcaccgttgccgcctgccgggggagcatcgtccttgtccatgccgccggccatgtccgggccagcgccctggtacattttggcgatgatggggttgcaaatgccctccagctccttaattttggcatcgaactcatcagcctcggggagctggttgccgtccagccactggatggcctgatcgatggcatcctcgatcttctttttggccgctgccgggagc

SEQ ID NO: 40985 - DNA, 466 bp, Oryza sativa
  Clone ID: uC-osroM202033e03b1
agctaaagtattttacttcaataattcaagacaactcaaacttagttggcacacatgtactccaccccctatcactagagttgttttcttttttgtacaagatcatcctaacattcccacaaggacataaagaaacagcagaaccttcccgggaaaatttcactgagacaggtgcattccgtgcacgtacaataatcatcaccatcatcgtatcatccaacctacaggaaaacgcaaattcaaggtactcttgtccaaacctgtaggtggccagtgatttgctcccatcggctacaactaccagactcaaaaaaactagacacaggtatgatgctaataagcttagcatgatcgactgatggacagacagtaataacaaataggaaacggagggcactatatgtgtcaactcgatgaactctataatatatggatgatttccagcgccctcctgcaaaaataacgt

SEQ ID NO: 40986 - DNA, 432 bp, Oryza sativa
  Clone ID: uC-osroM202033e04a1
gacatgtgggacccactattccattttatactacgagtacgtaccaaccgaacgtgctgccacgttaacactacaggtatcttgcggctccaattattgatgcttaggagaaatgtaagtaaaagaagatcaagcaaaactgacaaaaaatattttctatacttaataaaacaagaaatggaagatgaagcacaaattattccaggcactgactgcattcacaggagcaaagagaaggaaactaatcatcgtccccgaaacgtcccggtcaggaggcttgaaaacaagcattacaaccagcagcagcacaatccgctgtggcaaatgtcaaaagcaaatggaagtgggttctacatattacacaaggtaaaaaaagaagaaaaaataataaagggaagaagagagaaaaggtcgagctaacatgatggattg

SEQ ID NO: 40987 - DNA, 255 bp, Oryza sativa
  Clone ID: uC-osroM202033e04b1
tcttttagtggtaagctgtctagcgcttctgtattcattgagatggagatgtcgtatatggtgaatccacaaactgggtatgttaacaagcttaaggaacgggcaaagatttctacaccaagattctcatatttaccccagagcgggattttacatggatgaggctcattgctgataagtgcggtgcggcgctgggttaccctatttacaaaactgtcgactctgaggaggttctttgaccctagaattacactt

SEQ ID NO: 40988 - DNA, 479 bp, Oryza sativa
  Clone ID: uC-osroM202033e05a1
gtggtttttgttaacggaggccacgaattatgtggtgcacagccggtgggcaggaggtctaatggaggacgaaaaccgggctgcagatgtgctcgttccataacaccggaatactggaggtgggaatagggaccatagacgatttcaagttgaaacacctaccaggattgacctggatggtgctacttattaccgcacgagaatcaattgacaaggggttcgtgttacccggtggctactgatatacgtggtcattaaatataatggggatgctcatgccactcgtctgtacaagactgctatgaagggcttcttttttgatgttgtttgtgcatataagctagattaaccctggtacattgaaggggcactacggatgcacactgttgcctgaataactctagtggaactaattgcagcttcaaattatctgatgcggctgctttggttgcgattgaggctaggacaaacgacacgta

SEQ ID NO: 40989 - DNA, 369 bp, Oryza sativa
  Clone ID: uC-osroM202033e06a1
aaaaagggagtttttttattcacccatagtttttaacagagacttaacaaaaggggaataaaccccaggggatctcatgtttaatactcccagtaacaactaataataataagcacttgcaccttcagttccaggtcctatgtgctagggcagattgcacatccaattacacaaatttttggtgcaatggggattactgggggggtctaactttttttggggcctttattaggggcagaaggggcaacagcatcctcctttttttttacttcctccgagcttaccttcctggggttttttttggttggtggggccttttttggcttaacgggagggggggtttaagttgtttttggtgaagtgcttggg

SEQ ID NO: 40990 - DNA, 418 bp, Oryza sativa
  Clone ID: uC-osroM202033e07a1
cccatcttctctaaactatgttacaatagactatatttatctactaattcatactctctctgtccaaaaaaaaaaaagagtcaaattccagcgatgaatctggacacacatatatccaggtccattgctaggatttggttttttatgggacggaggttgtaggtatttgcagcacatcaagatcaacaaaaactgcaaaaacacggacaatatcgagctcgccggagcgagagcttctttgtgtcctcagctcgccggcggcgtggcggtggaggccctgcgcgcctttctggcggccgcggcggctgcggcggaggcggcggcggccgtgccgagggtgtggtcgtggaggaagaggcagacggcggagcagtcgtccaccctggacgtcgggaacttggcccgccaccgctgcacg

SEQ ID NO: 40991 - DNA, 505 bp, Oryza sativa
  Clone ID: uC-osroM202033e07b1
gtcgcggagcagcaaccccttcgactccgactccgacgatggcgggagggagcagagaccggcgagggcctcctccgtgcctcctccggccgaccagcggggctccctcttcggcggcggggatggcttctccgcctcgtcggcggcggcgaggagccggtacaggaacgacttccgcgacaccggcggcgtggaggcccagtcggtgcaggagctggagggctacgcggcgtacaaggcggaggagaccactcagcgggtgcagggctgcgtccgcatcgccgaggagatgagggataccgcgttcaagagcctcgttaccatacaccagcagggccagcagatcacgcgcacgcacatgatgaccctcgacattggccaggatctctccaggagcgagaagctgctgggtgatcttgggggcatatttttccaaaacagggaagccaaaaagaatggagaaatcagggggcctatgctaacttgagaagattcctttttcgga

SEQ ID NO: 40992 - DNA, 504 bp, Oryza sativa
  Clone ID: uC-osroM202033e08a1
tgttgcggctgggggtgctgactcagcagcataaggcttgtggagggttgctgctggtgcatgcgggcctccttcagccatggacacacccacaggctttaggccagctgcagtggcagcagcggcggttgatgctgcatgtgctgctgcgctgccagggggccctggggggccctgctgctgctgctgctggtggtggtgctgctgttggtgctgctggtaaccctgagacggcccctgttgctgctgcatggggtgctgtggtctctgctgctgctgcataggatgctgtggcctgccctgctgctgctgggggcctggcccaggtggcccaggagggcctggtgggccgggcctgctgcctagaggccctggtgggccaggcctgctgccaggtggcatcatgggcggtccgcctggcccaggcgccggtgggccaggaggtgggccgccggcaggtggcatcattggtggtccgcctggcccaggtgctggtgggccacc

SEQ ID NO: 40993 - DNA, 462 bp, Oryza sativa
  Clone ID: uC-osroM202033e08b1
cttcctcctccccaaaccctagccgccgccgccggcgtactcgagagaaacatcagcatccatggcgggcaagggcgagggtccggccatcggcatcgaccttggcacgacctactcgtgcgtgggcgtttggcagcacgaccgcgtggagatcatcgccaacgaccagggcaaccgcaccaccccctcctacgtcggcttcaccgactccgagaggctcatcggagatgctgccaagaaccaggtcgccatgaaccccatcaacaccgtcttcgatgccaagcgtctcattggcaggaggtttagcgatgcttctgttcagagtgacattaagctctggcccttcaaggtgattgctggacctggcgacaagcctatgattgttgcccagtacaagggtgaggagaaagcagtttgctgccgaagagatctcctccatggtacttatcaagatgcgtgaga

SEQ ID NO: 40994 - DNA, 503 bp, Oryza sativa
  Clone ID: uC-osroM202033e09a1
gggaaggacggcggcgccgccagcgagtacctcatcgaggaggaggaggggctcaacgagcacaacgtcgtcgagaagtgctccgagatccagcacgccatctccgaaggagcaacttctttcctcttcactgaatacaagtatgttggactattcatgggcattttcgcggtcctgatcttcctcttccttggatctgttgagggattcagcacaaagagtcaaccttgccactacagcaaggataggatgtgcaagcctgcccttgcaaatgctatcttcagtactgttgcctttgtgcttggtgcagtcacctctcttgtatctggtttccttggaatgaagattgcaacttatgcaaatgccaggacaacccttgaggcaaggaagggtgttgggaaggcattcattactgctttccgctctggtgctgtcatgggtttcctgcttgctgcaagtggccttgttgttctttacattgccatcaacttgttcggaattta

SEQ ID NO: 40995 - DNA, 388 bp, Oryza sativa
  unsure (1)..(388): unsure at all n locations
  Clone ID: uC-osroM202033e10a1
gatcaagatcttattttccttgacacaaatcaataataataatactaataataatacaaagaaacactctcatttggggaaaaaaaagagagaaaaattaagtactagtactactatttctcatctctattgacctaggaagaaagcttctgctcttcttccctcctctgttctttcatggcaacagctaaagaacagagggtggtcaccatgaactgcttctttagtgttcatcagctatgtgaggatcggatcgggttggattggattggattggattggngttgagtttggccaccattgatctggttttggtcataatctcatgcgaagaagctggggatatcaatggtgaatccggggtccaacttgaaggcctttagggcgg

SEQ ID NO: 40996 - DNA, 119 bp, Oryza sativa
  Clone ID: uC-osroM202033e10b1
cgccaccacgcgcgactctttactggatggtgtgcaggcgtggtacgagatcgagaggctgagccgccgcgttatgttcaggcgcaactgctacgccgtgcacgctcgccgtgtcgccg

SEQ ID NO: 40997 - DNA, 435 bp, Oryza sativa
  unsure (1)..(435): unsure at all n locations
  Clone ID: uC-osroM202033e11a1
atagcaaatgtaattcacccttaaataacatcacgaaaattgctcaagaaatatgcaagcccattcatgacagtaactaaataagttaattatacatacacaacacacactgcacacgaagagcacaccatatatattagttcttctttctgctaaagacttaaccatcacccattttacttaacctgcttcttggccgagttcttccgtttcggcctggcctcctgcagcatggacagcacctccctcatcgacggccgctcctgcgggcaccggctggtgcacagcagcgccaccctaagcgccagcgccatctcgtcccgcgtgccaccgacatcattgtcggcccacgccgcagcgtcgatcacgtngcccaccccgccttcggccacctttcgccgcacccagtccacgatgttgttcccctccccgtac

SEQ ID NO: 40998 - DNA, 254 bp, Oryza sativa
  Clone ID: uC-osroM202033e11b1
gttaatggtctgatagtctgcttgaagttctgaattgtgctggttgtccaaatattaagaaagtaatcatacattcaatgacaacctatatacgcctgtctaaaatcaatcttactctgcacacatattcaaaggaagtggcttcgacatgctccaatctttatactatgaaggtgagcacttgtagctccctggaggctctggagcttgagtgcccaagactgtcaattctccaagtttatgccatgcaccat

SEQ ID NO: 40999 - DNA, 314 bp, Oryza sativa
  Clone ID: uC-osroM202033e12a1
gaaaagaaagctatcaagcaggtgccttattgcaaagttacaatacacactggcgaatgaactgcaaacttaacttatgtgtcactaacaacttagaaacgagcaaacaaaaaccagtcagttcatcgtcttagactaaaacaggcaccctgcagacaagtgccttgatcaaacggtttttacacggcaaaccaacagacgaaaattcaccagttaaacacatttcagcatctcttcgtacgcataagaactcttcaagcttctgagcttcatcaggtgtttctttgaccgccataatgtttttttcaaactcc

SEQ ID NO: 41000 - DNA, 379 bp, Oryza sativa
  Clone ID: uC-osroM202033f01a1
aaatagaggggaactagctaacattctccataacatcatccagtaccatagtaaggctgctgctagttgcatagcccgataagagtctcacacaaagcacagaaggttaagaatgggaaagaccgaaaaatcacaagagaagctaaaacaattcttagagctagctaatcacgtctttcttgctccatcccattcgcctctttgccacatgccacggctgctcggcctcggcagcctccctcacttgtactccaggatcatgttgttctcgggggccagcccaacgcaggccctcatgatgttctcaagcattgccctctgctttgccagggcgttcaccactggtgtgccaggaggaacaaggggtgccttggtgagg

SEQ ID NO: 41001 - DNA, 328 bp, Oryza sativa
  Clone ID: uC-osroM202033f01b1
tttctccttctcgctcgcttcgcccgcataagtctagccacaaacccgccgccgccgccgccgccgccgccgctagcttccgcggagcggggcgagatgttcatcgagagcttccgcgtggagagcccgcacgtgcggtacggcgcggcggagatcgagtcggactaccagtacgacacgacggagctggtgcacgagagccacgacggcgcctcccgctggatcgtccgccccaagtccgttcgctacaactttcggaccaccaccaccgtccccaagctcggggtgatgcttcgggggtggggcggtaacaacggctcaacgctga

SEQ ID NO: 41002 - DNA, 439 bp, Oryza sativa
  unsure (1)..(439): unsure at all n locations
  Clone ID: uC-osroM202033f02a1
agaacatcacagatttatttatgcactcaagtgagcagatttatctgaatggtttcaccacaaacaatagttcagacagaaaggtaactgactgtaattaaaggtagtaaaacagattaacgacccacttagccatcagctttggcttcagaatttcagatcctctcatgacatcgacttgcgccatttcggcgtcggcgtcgccgcggcggcgccggcggcgccgcccctgcccttcttcccgctcgccggcgtccgccgctcgatgccgctctcggagtcctccacccgcgcgacgtcggcgctcatgccgccgaaccagaacgtgctccacttgaagaacccgccgccgccaccgctgccgccttcgncgggccgncttcttttcgtgctcagcctgtccacctgagcctgcagcgcgctgcactggacctggagg

SEQ ID NO: 41003 - DNA, 273 bp, Oryza sativa
  Clone ID: uC-osroM202033f02b1
gggggacccacgacgtccgacactgtttcgctcgtctgcagggtgtggtacagagatcgagaggctgagccgccgcggcgtcttcgtgggcaactgctacgccgtgcgcgccggccgagtcgccgggcgactccccaacgtgcgggcgctcacggtgaaggggaagccccacttagcccacgttaacctcgtgccccccgactggggcggatactcggggccgccgaccgaggcgtccgccaggggatgccacggccttcaggagctcatgat

SEQ ID NO: 41004 - DNA, 391 bp, Oryza sativa
  Clone ID: uC-osroM202033f03a1
ataggatcaaaacatttctattaccacaactttttaaggatggaatcgagtagcaatactttcaccccaaaatacagtttagcgacaatatcttagaaaagccgcttgctttgccgccatggctggcaagctgagcagagcagctaacacaaagaacacgagatcactataaaccaaacggcaacgaacgaagaaaatacagggtcttttttgtctgaagatacacgaagcggttcgttttcttttatttttagtctcctctcctcctcgatgatgggtgtatggcaatggcaatggcgatgggatcttggcttagttgatgggaaggggctcgccgttccactccttgaggcagtcgagcatggggtcgatgagcttgccctggctgatg

SEQ ID NO: 41005 - DNA, 473 bp, Oryza sativa
  Clone ID: uC-osroM202033f04a1
gaatgacatctttgaatgcatatcatgagtggaagaactgggcggccaatgactgggcaggctgatcatcccaacttccttcaagcaactcatgtctaactagaaaagaaaaaaaagaagaaaataaaaagattatgtacagaaaaaaggccatcatcacaacatggacctctggcacaggcgatagcagttgttgctcaaaccctattgcaagcctgtaaaaggatggcttttattctacagctgcatagctcgaacacctgcaagaaagccacaaccaaacagcagcagccaaaccacaagtattcttcacctcccctactcctgcgctaactcaaaactggcaagaagtgccaagcctctgccttgccctttgccccgcagcgccgcacttgcgcgagcggaatgcctcgggaaggagctcctggaacttctcgaggaatagcgcccatgtctccgatcccatgtcggcc

SEQ ID NO: 41006 - DNA, 313 bp, Oryza sativa
  Clone ID: uC-osroM202033f05a1
ggaaaaagggaaaaaagggtttaaaaattgggggggggggggggcccaaaaaaaaaaggggggggaaggcccaaaaaaccttggggtttggggggggccatttgaaaaaaacaaaaaaggggggaaaacaaattgggggcctttggaaaaacccccaaaaatttgtaaaggtaaaaggcccccccccccaggggggaaaagaatggggggaaaaaaaaaaacccgggagggggcaaaaaaaaattgaattttaattacaaaaaaaaaaaaggggggtttttttttttttttgcaaaaagggggggggacccct

SEQ ID NO: 41007 - DNA, 449 bp, Oryza sativa
  Clone ID: uC-osroM202033f06a1
tttgtttttttttttttttttttttttttttttttttttttttttttttttttttttttttttttttttttttttttttaaaaaaagggggaaccccaatttggtccccggggaaaggattaaaaattttttgggggggggaaaccagccattcagccaagaccccaaatttaaaagaaaaaaaattttttatcttttaaaaccctccaagggcaaaagggaaaaaaaaaaagggggggttctacaaaaaaattggaccccaagaaccaagaaaaaactggggtggggtattaaaaaaaacccccgggggggtgtcaagggggggagaaaaaaacgagggggaaaaagaaataggcagggggacccgccctgtttttaaaggggcccttggaggccaagaaataaccttcccaccggggcacccgctggtttttgcacacccaaaaatt

SEQ ID NO: 41008 - DNA, 409 bp, Oryza sativa
  Clone ID: uC-osroM202033f07a1
gtgcagcaagagccccgcatgggcgcctccatcctccgcctcttcttccacgactgcttcgtcaatgggtgcgacgcgtcggtgctgctggacgactcgtcgacgatcaccggcgagaagaacgccgggccgaacgccaactcgctgcgcggattcgaggtcatcgactccatcaagtcgcaggtcgaggccgcctgccccggcaccgtctcctgcgccgacatcctcgccgtcgccgcccgcgacggcgtcaacctgttgggtgggccgacgtgggcggtgcagctggggcggcgcgacacgcggacggcgagccagtcggcggcgaacagcaacctgcccgcgccgtcgtccagcgcggcggcgctggtgtcggcggtcgggttcaagggctcgactcccgcgacat

SEQ ID NO: 41009 - DNA, 337 bp, Oryza sativa
  Clone ID: uC-osroM202033f07b1
accaaatgcatcgatcgatcgatcaccaccaatattatgatacaggaaaagaatgcgataattaaccccaaaccaaaataacaaaaaaaaaaaggcaatgcatgcagccctttgtgtcactgcagcgtgggccccaacttccttttgatccttcccttttgacagcgccactgcacctaattatttcggtcccttggattctcgatcggttccttcccacgccaaaaaaaggcacacgttaaactgatccctgggccccaactgcttcataccctagtgctagctggcagttgactatgcattcattcaaaccggtcgatcgatcgatctccggacg

SEQ ID NO: 41010 - DNA, 426 bp, Oryza sativa
  Clone ID: uC-osroM202033f08a1
gacatgtgggacccactattccattttatactacgagtacgtaccaaccgaacgtgctgccacgtcaacactacagctatcttgcggctccaattattgatgcttaggagaaatgtaagtaaaagaagatcaagcaaaactgacaaaaaatattttctatacttaataaaacaagaaatggaagatgaagcagaaattattccaggcactgactgcattcacaggagcaaagagaaggaaactaatcatcgtccccgaaacgtcccggtcaggaggcttgaaaacaagcattacaaccagcagcagcacaatccgctgtggcaaatgtcaaaagcaaatggaagtgggttctacatattacacaaggtaaaaaaagaagaaaaaataataaagggaagaagagagaaaaggtcgagctaacatgat

SEQ ID NO: 41011 - DNA, 410 bp, Oryza sativa
  Clone ID: uC-osroM202033f09a1
cccatcttctctaaactatgttacaatagactatatttatctactaattcatactctctctgtccaaaaaaaaaaaagagtcaaattccagcgatgaatctggacacacatatatccaggtccattgctaggatttggttttttatgggacggaggttgtaggtatttgcagcacatcaagatcaacaaaaactgcaaaaacacggacaatatcgagctcgccggagcgagagcttctttgtgtcctcagctcgccggcggcgtggcggtggaggccctgcgcgcctttctggcggccgcggcggctgcggcggaggcggcggcggccgtgccgagggtgtggtcgtggaggaagaggcaaacggcggaacagtcgtccaccctggacgtcgggaacttggcccgccacc

SEQ ID NO: 41012 - DNA, 204 bp, Oryza sativa
  Clone ID: uC-osroM202033f09b1
ctctcctccgccaccatcagcaagaagcagctcaagaaggatgcgaggcaggcggagaaggcctagaacgtgtccctgagacagcagcagcagcagccgcaggccgacgccgaccaccccttggcggtcaactacggcgacctccccgtcgaggagatccagtccaagaccatctccggccgcgtgtggaccgagatcgggggt

SEQ ID NO: 41013 - DNA, 342 bp, Oryza sativa
  Clone ID: uC-osroM202033f10a1
aaaggatcaacccattatggttaccacaacattcggaggggggaatggtgaggacttacttatacccccatacgcaggtacgcgacaatttcttacaaaagccatttgctctgacaacatggttgcacagttgactaacataattcacacaaaaatcacgagaacactataaacgaaacagtattaaacgcacaaaaaccgggcattgtaaagaatgaaggtgcactaaacgtatacacgaacagtatttttagctttggctccattctctatagatggaacgtttggaaatgttaaaggctattggatcttgggtaacactacagggaggtgaagatgctt

SEQ ID NO: 41014 - DNA, 447 bp, Oryza sativa
  Clone ID: uC-osroM202033f10b1
acgccaccacgcgcgcttttaaatggtgtggatccaatacctgtcaatagagggcttgttggcgcctactcattgacaaccagcaaaggcgagaaggctgccattgcgaagccaaatgacgagagagccatttgcaccgaacaattcatagggctttacagggaaagcccttgggcagcctggccttaaaagatcggctcgagttgaggagactggcttagagagggcgctgcctaccttgggtattatgagaacactgctaatgggccgcgaacggcgcctgcgaagatccctcatcctgtaagcaatgcggatgaatgggttagtccagccaagatggcggcctcctagggcttgtgcaagggcctgaacgccagattgcatcatctcagcagttgattcctcatgattttgatgcccgtggccatgggacttcaagcttttctg

SEQ ID NO: 41015 - DNA, 432 bp, Oryza sativa
  Clone ID: uC-osroM202033f11a1
atcaaaggcacgtaccacttttgatagcaatatccacctctaatttcagttattgccatttctgcaagcgtagtacaataggaaagcttgctgaagtcatccagatatattggcctggtcgacttcttttccactagaaagtagcagtactctagtgcaaactccacagaacacagggtactactctgatggaacgagtagatattgtatatttcctcgtgtatgttgacagtgagaactgtcttctccaaaataacagcaacaaaaataaccccatgcatcattacaatccacatatcaaagcttgaactttatacaagcacacggtcaccacaagtaactgtattctgccgtattacctcagaaagcagatcaccctaatgcatttcaatctcctgcacaggaatatttgtgtggtcagagcgaccagta

SEQ ID NO: 41016 - DNA, 344 bp, Oryza sativa
  unsure (1)..(344): unsure at all n locations
  Clone ID: uC-osroM202033f11b1
gtaccctgaagagtgcaagtccagcttctctactgaaggaagctatacatgttattagctgtggttacgaagacaagacagactgggggaaggagattggctggatctatggttcaattacagaagatatcttgactgggtttaagatgcactgccatggttggcggtctatttactgcattccaaagcggccagcattcaaaggttctgcacctcttaatcttttggatcgtcttcaccaggtccttcgttgggctcttggatctgttgaaattttcttcagcaaacattgcccactttggtatggagangtggggggccataaaattcttggaacggatttt

SEQ ID NO: 41017 - DNA, 442 bp, Oryza sativa
  Clone ID: uC-osroM202033f12a1
ggcattggcaaacaaatcaaaaattatgaaaccggaaggggtatatgtttatcatgcaatgacatttcagtttttaggggggcctaatgaaatgaatatacaaccgggctcacgggttaaaaaataaattaattaagaaaatggtgggcacaattataccggttaggcctgaagtttttaaatcccaaagtaggggttatttgtgccatcgcccagcagtcggcatgtactaatcattttccatcatctaaaataggaacaattctgcattttcttctaagcaaagctgttgccaaaacttttgcatttttcttaacttgttgaatctatgctttatattcaggggttgcaacttgcttcagagttatcaccaaggaagcaatatataccatggggaccttccgtcctggataattgttttgaatggaaaacaacaaaattt

SEQ ID NO: 41018 - DNA, 492 bp, Oryza sativa
  Clone ID: uC-osroM202033g01b1
cgttctgtccgaaggcgcgtgatcccgcactcgcagactgagcatcagctgcatcactccccgcctatccgcgatcgcaagggccgggccgatcccccccgcaccagaagccctcgagattccgatctgccagaaaaccttcgcctcgcagcgcgacggatccatccatattggcacctttctgccacagggaatttactagctcttggagaaactacagttgaggcttgcgggttggatgcaccttcatgcttataagaaggctcaaagctacctgatataactcctgttctgtcataaacaggttattaacatgggaatttacctcagtacccccaaaacccgatagttctctgaagacggggaaaatgataagcttaaacttggtccttcggctatgcaaggaaggcgtgcatacatggcagatgctcattcagcatcgctaaatcctgacaatgagacatcgtctcttggtgttctggatgccctgga

SEQ ID NO: 41019 - DNA, 507 bp, Oryza sativa
  Clone ID: uC-osroM202033g02a1
tttgttgagaaaacgattgccgtttattgagccaagggtgcatgtagggagagcatacatactgatatttttggtgttgagtgcttaccccaagaatatgatacagagatcgacgcttcaatatacaccaagggtgaatcatggggttagcttcaaaatgagccgaaaggcgaaagaattgacaagaaaaaaaagaaataatacgatatggaaaaaaaataagggagcaaatcacaacagctctatatgcagctgaagaaaacaaaaacaattacagccgttttcgcctatggtcctgcctcaatcctctcgatggtttctaaccttgttatccgtttccatcctttcatagtcgcaaccaggttaaccaacccgacaacctgacttttgctgtattctggatgagaccgtgcccaatgaacatactcggtctctggcaaataataagcctttatgaaagtatccacaatttgcagctttggccctacatttgcggatacaatgtgc

SEQ ID NO: 41020 - DNA, 397 bp, Oryza sativa
  Clone ID: uC-osroM202033g03a1
gaagaaacaagctctgggacactttattacatcgagcaaggaatagctgattatttattatacatcggtttagtaaatgaaataacgacaggatatactggacaagaattttcgaggtctgtctttctcaatcatggttttcaccatttatgacaaatggcctggtgtttttttggctctaaagcataaatacaaaacttcaagagttttttgtctgggtcttaggtctgcaggaagctcgcgtactttgcaccaaggaaaagcctctgcacgcagagcagggcattcttcctcacttcggcgttctcgtggttcatgagcttcatcactcggtccttcgcctttagatctgccaccacaatgcgcccaaaagggtggtactgaaggaactgtgaga

SEQ ID NO: 41021 - DNA, 464 bp, Oryza sativa
  Clone ID: uC-osroM202033g04a1
ggtataaattgctactcaatactatattaataaaaccataataatccaaactttaacaagtaaagcaaaaccggggccataatgaaagcccgtaccaaaaaagttgcaggagcactcaagaattcggtgtaaaacgaacgacaaattattgcaggtataactaaaagcgataaaagatcgatcatttagtcgacttcctcgatcttgggccctggtccgctgcttccgccggcggccgccggagcatcctcgtccatgcctccggccatgtcagctccggcgccctggtacatcttggcgatgatggggttgcagacgccctccagctccttcatcttgtcctcgaactcctcggcctcggcgagctggttgctgtcgagccagctgatggcaccgtcgatggcgtcctcgatcttctttttgtcggcctccggcagcttggacgcgatcttgtcgtccttgat

SEQ ID NO: 41022 - DNA, 536 bp, Oryza sativa
  Clone ID: uC-osroM202033g04b1
gtcggtgcagagcgacgcgaagctgtggccgttcaaggtgctacccggccccggcgacaagccgatgatcggcgtgcagtacaagggagaggagaagcagttctccgccgaggagatctcgtccatggtgctcaacaagatgaaggagacggccgaggcctatctcggaagcaccgtcaagaacgccgtcgtcaccgtcccggcctacttcaacgactcccagcgccaggccaccaaggacgccggcgtcatctccggcctcaacgtcatgcgcatcatcaacgagcccaccgtcgtcgccatcgcctacggcctcgacaagaagtcgagcagcgtcggcgagaagaacgtgctcatctttgacctcggcgggggcacattcgatgtctccctcctcacatcgaggagggcatcttcgaggtgaaggcaccggcggtgacacccaccttgaagcgaggacttcgacaccggatggtgaaccacttcgtgcaggaattaagaggaagaacaggaggacatcacggcaaccgagggcg

SEQ ID NO: 41023 - DNA, 463 bp, Oryza sativa
  Clone ID: uC-osroM202033g05a1
ataggatcaaaacatttctattaccacaactttttaaggatggaatcgagtagcaatactttcaccccaaaatacagtttagcgacaatatcttagaaaagccgcttgctttgccgccatggctggcaagctgagcagagcagctaacacaaagaacacgagatcactataaaccaaacggcaacgaacgaagaaaatacagggtcttttttgtctgaagatacacgaagcggttcgttttcttttatttttagtctcctctcctcctcgatgatgggtgtatggcaatggcaatggcgatgggatcttggcttagttgatgggaaggggctcgccgttccactccttgaggcagtcgagcatggggtcgatgagcttgccctggctgatgccgaggaacaccttgttgcactcctcgccgggggacttgagcttctcgccggtgaggaatacgcagccgagc

SEQ ID NO: 41024 - DNA, 463 bp, Oryza sativa
  Clone ID: uC-osroM202033g06a1
caaaatcaacgatgacttggacaacatatgcagtgtaaaagcccaaattttaatgaacaaaccatcgaggtagcagtctgctttacatgtccacaaacgaccatggtcgggccttcagctgccaacctgagctgcctgataatcaggcgtaccatgcaagcacaccgagctcacgttacagtaggcagtttgggcaagttacactggatttttcgctacttctccctaatcggagcacgttctcagacatgacatatcttacacgccctcgtttgggccaacgaatatatgtacaggatgaaagaatattgtacaggtgagcggtcagtgccgttggtattgcaacgggacgagcctagcgttaacggcttcaatgtatgtgcgcaggcggcgtcgatcatctcttgttagggacagagcggggttcagggcgagtgacggtgcctcagtcaggagaaagcgc

SEQ ID NO: 41025 - DNA, 447 bp, Oryza sativa
  Clone ID: uC-osroM202033g06b1
gtccttttattcacgagaaatagatcgccttttgattgagacgtgagccatggctgcattgacttatgcagcgagatcctgagaatcaccctcagtggaacgccttgcccattacgagttcgtgaaccatccatttgtcgctgaccacgcttagtagagaaccttgagccggacaccatcggacataagaacaaggcttttcgcttattaatcagtagtcccacgaggaccttcaagtccacgattttcagcaagataggatgtccttttccctttggatgatgagtcaaccggacaggatgaaggctctgtttctgatagtaagagtgcaataaaatcctatgggtctgccacgagtaaaaggcttgattaaactttaggtcagagtccaactaatacattcaagcctggtctctaaattattaggggaaacaatttcccattttg

SEQ ID NO: 41026 - DNA, 402 bp, Oryza sativa
  unsure (1)..(402): unsure at all n locations
  Clone ID: uC-osroM202033g07a1
gggaacgaatgatgaagcctatacgattatattacaagcttaatcattggccaaaatactactcacaggaggaagaacgatcgaatgaagtagctagcagaaagaggataatgaatatgaccaagaaaagctgcgacaggtgaatcgacctggctgctactgcgatcatgtgatcaagaatcgtggctttcatggtgggtatcgccggcgacggcgacgtcggcgtcggcgtcgccgtctgtcggctcccacgacgaggcggtgagcagggacaggtccttccacccgagcttgaggcagccgtccttttcgacgagagggtagcccttccatgggtacatgccaagaagcagccttgcctgccggnggggctgccggccagggtcaccggccggaaccccg

SEQ ID NO: 41027 - DNA, 482 bp, Oryza sativa
  Clone ID: uC-osroM202033g08a1
ggaagaaaattacccttgttatgtacatcaatgctctagattgtactacagcattttttacgtcaaacaaaaattgtagagctatatactgtatgcgaagctacaaacctcttcatgagaacatatacacaccttgcagcagcggtagcagctagcagcagcagcatcatcatatctatcctaattaagtacgagagcatgacatcatctgaagtacacccctgaagcaaacaggcaaccagtacacagagtaggcagaggcggatcggatcggccatatcaacaatgcttgggcgaattcctccgcggcgagaagaggcggcgcggcgagagcatggtgaggaacctcggcgaggcgatgccgttgagcgaccggtagtccgacatgaggaggccctccgtgttctcgtgcaccctggtgcgcccgggcgtcatcctcgccgtgaaggtgctgtacttgaccagcttgggcagccacgcct

SEQ ID NO: 41028 - DNA, 353 bp, Oryza sativa
  Clone ID: uC-osroM202033g09a1
cacaggaattgagatgcattcccacaccagatgggggtttggaagctgaatcaagataccattttgctattctttaccaagcatggtgtcaaaagtccatgcaactgctcaaaactaagactccacagtagtcctgacacaaggggagactcaaaaaacggagtgaaacagaggcaaaagcataagttataaaattggcaagttttgggtatgtttttccagtcccagagataagcttgacaaccattcatggttttttgattgcacacatgacaaatggtttcagcttgcaatgcaaaataaaagcctgacggagaaaaaccgattttttttttgtttttgcaccatggcgg

SEQ ID NO: 41029 - DNA, 473 bp, Oryza sativa
  Clone ID: uC-osroM202033g10a1
ggattaataatttattgagtttttacataatttacaaatcatttgttattgtatctacattatcgtctttgagcagctgttccaataatgattccattgtgcttatgtaactaggcatgtaatgctcctttatcatgtttggagctagccttattttcccatacaaatctcttggcgtttcataaatgctaatgatctcattgctgctggatccctcaccaggatttgggtcaggtgaggccattgcaaccatgtgaataattcttccaggagggaaaaactggcgcgaactgcaggttggtagcggttctttcagcttgtctttgatatcacagttctgcttcagtgattctggttcctcctgccctgtcaaggatgattgttcttgttcagtgtccagtgatccattgatgttcacatccccttgtgctgcaaagcctgatccagcaacagactttgtactgataacatta

SEQ ID NO: 41030 - DNA, 463 bp, Oryza sativa
  Clone ID: uC-osroM202033g10b1
cttcaacgcctcgcgatcgatcgccccaaatccccgccgccgccgccgccgccgcgaatcgccggatgcccgccgccgtcgccgccgcgggggcggcggcagcctcgggcaccgcgctgctcgcctacatactcctcgcatgctgccggccgcagccggcgccggaggccggcgaggaggaggaggacggagttcgcggctgttgtcctccggcgcggaagcgcgggggagggaggcggttgatggctgtgagcatgctatgtttgagagccactgactatgttgcggcacatcatttaggtggactcatgttgaatctgtgcttggcctgattgatgagatgcttgcagtacatcgtaggcgagcagaacgtgttctatgatcactctctctctgttgaagacatggacgaaccttcctaacgtaagttttccataattgtacatgtcctatgatgagtgct

SEQ ID NO: 41031 - DNA, 462 bp, Oryza sativa
  Clone ID: uC-osroM202033g11a1
gtatgatgatggatttgatggacgatcagttggggacgacaccggcatagttgcaaacaccgcaagtgtttccaccgttgagtctgatgtaacctccctctccccatccagttccccaggagttcttgatcttccaggcaccaccgacgacaccgacggcaaggacagcgtggttgatggaggcagcgcagttggagaagatacctgatctgtaggggctccagttagtggcatcaacagtgacggagacgggggagttgttcaactgggaagtaattccattgcatccgctgtagcttccgaaaccgttgattctgtaagcaccaccctgggtcttgcaagcctggtctctagcaacatagggataggcagattcggtagtgataccgttacccttgatgtagttaagggcagatgaaggccatccaccgttgcatccctggttgccctgaggtctggagc

SEQ ID NO: 41032 - DNA, 458 bp, Oryza sativa
  Clone ID: uC-osroM202033g12a1
gggggaaatatattcaattattattagtgaagcatcttattgcctgcttttacaccccaatagcttatacatcccaacaaaaaatcgtaaattcaacaccggcaacaacaaaaccccaaaactcactttgttttgacactgacgccatctgttccagcgatgatcaccgaagtcgccatgtccaggaacagcccatgctcaacgacgccttccaaagctgagatctccttccctgctgccaacgcatccttgatcggcgtcttgaagtataaatcaacgatgtagtttgagttgtcggtaacgtagggtttgccgccttcatccaatctcagcttcgcctcgcatccttcatcgttaaacagatcctgcaatctcacttggttgtacttccagcagaactgcacaaccttcacaggcatggctagaccactcccttctaagccggtaactagctttgt

SEQ ID NO: 41033 - DNA, 286 bp, Oryza sativa
  Clone ID: uC-osroM202033h01a1
gggaacgaatgatgaagcctatacgattatattacaagcttaatcatcggccaaaatactactcacaggaggaagaacgatcgaatgaagtagctagcagaaagaggataatgaatatgaccaagaaaagctgcgacaggtgaatcgacctggctgctactgcgatcatgtgatcaagaatcgtggctctcatggggggtatcgccggcgacggcgacgtcggcgtcggcgtcgccgtctgtcggctcccacgacaaggcggtgagcaaggacaggtccttccacc

SEQ ID NO: 41034 - DNA, 443 bp, Oryza sativa
  unsure (1)..(443): unsure at all n locations
  Clone ID: uC-osroM202033h02a1
tttgtttttttttttttttttgtttttttttttcccaaactacaggggcaaatccatctaattaaacatcaagactcgttttaacaacaacctgccacaattcacaaacagcaggctgttgcacaagacggtgtacacggttcattttatttgggtgttcgtttccaccatcagattgatataatacacgcgaacaagcagaaacattcggcaacaatttttccaggaaaatcgcggcctatttcgtcatcatcccgagcgagcgttttttggaagagggagtttttttcagacaggcacagccttaatggcaggagcgagtgaccaacgtcgacgtcggcgtcctagtagccaccctggatgtaggcgttgagccggttcagtttttcccggtgcttgctgaccacggngcggacaatgtctccaatggggaccattccaac

SEQ ID NO: 41035 - DNA, 438 bp, Oryza sativa
  unsure (1)..(438): unsure at all n locations
  Clone ID: uC-osroM202033h03a1
aaacacataacccctggcggggtggattgcccaggaaatttggtttgaagatgaatcaacctgcccctaagggcaaacgaatttcaatctaatcagggggttttgtaaagcatacttccaggggtgggggggattcggagacacaattaccctttttgcccaaacggggaaaaaattttttcccacgattttttttttccaagttacaatcaagccccttttttccatggctggataacggcaacaacaatgatccccattttgatnaccaggaggatgatggcttaaaacatccacttcctggagtttttttggggctttttcgggttttgaaaagcactgaccccttgttgtatggggggggtagcatttgaaacatggggctttatgtggttgatcatgtctccttgagcataaaccaaaactgccatatccatg

SEQ ID NO: 41036 - DNA, 304 bp, Oryza sativa
  Clone ID: uC-osroM202033h03b1
cctaactctctccctctctctctcctcgccggcggcgccgcctccacgtttctctctcctcgccgcgcgccggcgagacctcgccgccatgaacaatctcctcaccgattcgtttgagctccctcggggaggctcttcaagagatggggacattgaaatgggaatgcaagctgatccttcagacaatctaaaagggttcttgaaaaaggttggcgcaattgaaagcctaattggtaagctgacgaaacttttgcgtaagctttaaacgtggaatggggaatctaaagcggtgtccaaagccagg

SEQ ID NO: 41037 - DNA, 448 bp, Oryza sativa
  Clone ID: uC-osroM202033h04a1
cccatcttctctaaactatgttacaatagactatatttatctactaattcatactctctctgtccaaaaaaaaaaaagagtcaaattccagcgatgaatctggacacacatatatccaggtccattgctaggatttggttttttatgggacggaggttgtaggtatttgcagcacatcaagatcaacaaaaactgcaaaaacacggacaatatcgagctcgccggagcgagagcttctttgtgtcctcagctcgccggcggcgtggcggaggaggccctgcgcgcctttctggcggccgcggcggctgcggcggaggcggcggcggccgtgccgagggtgtggtcgtggaggaagaggcagacggcggagcagtcgtccaccctggacgtcgggaacttggcccgccaccgctgcacggcggtctccaccaccggctttgacgcgtgc

SEQ ID NO: 41038 - DNA, 456 bp, Oryza sativa
  Clone ID: uC-osroM202033h04b1
ctttgttcacgggattttgcatgcttatccgatggggactggggacctggctggcttgcctgatacgaagagggagtggaaccatgtacatcggaacgcattcgcggagcagagtctgtgaagcatacctagatacctgaacatgctgagaagccagctgcttgactcagacgccaacggacgcatgacgtggcccgacacctattagtagtatgcctactacaacttcacgcgaaccatcctaggacagatttgtgcatttgcctactgcagacgagagagctgcacaggatgaagggactgcttctcgatcgtggagtgcgactatctggctcgagcgtgggacgagatcactgactacagcatctttcgcgatgacttgagcagactgtattcttctgcgatggtaagtttggatgctctattagtgcacttatagtatcaaactcctggagc

SEQ ID NO: 41039 - DNA, 455 bp, Oryza sativa
  Clone ID: uC-osroM202033h05a1
tttgttttttttttttgaaaagcaacgatgacttggacaacatatgcagggtaaaagcccaaatttttttgaacaaacaataaaggtggcaggctgttttacatgtccacaaacaaccatggtcgggccttcagctgccaacctgagctgcctgataatcaggcggtccatgcaagcacaccgagctgacgttacagtaggcagtttgggcaagttacattggatttttggctactagtgcctaatgggagcacgttttcagacatgacatttcttacacgcccttgtttgggccaaccaatttatgtacaggatgaaagaatattgtacaggtgagcggtaagggccgttggttttgcaacgggacgagcctagcgttaacggcttcaatggatgggcgcagggggaccccatcatgtcttgttagggacagagcggggtttatggccagtgac

SEQ ID NO: 41040 - DNA, 354 bp, Oryza sativa
  Clone ID: uC-osroM202033h06a1
ggaggaataaatcgctactcaatgctatattagttaaaccatgatcaaccgaattttaacaggtaaagaaaaaccggggacatatagaaagcctgcaccaaaacagatgtatgaacactaacaaattcacagttaaacgaacgacaagtaattggcagtataactaaaagcgattgaagactaatcatttacgagagtttctcaatcttgggccctcgcccgttaattacaccggcggccagcgcacaatgcttgtacatgcctacggccatgtcaatttcagcgccgtgggacataatgcctacgaggggggagcagacgccctgcagagagtttatcttggaaccgaactca

SEQ ID NO: 41041 - DNA, 469 bp, Oryza sativa
  unsure (1)..(469): unsure at all n locations
  Clone ID: uC-osroM202033h06b1
tttctcatctaactcagttactgccttgctaccctaccccagctgcacgctcaggtccactgccagcgtgcgatcgatgactacgattaccgtaggggccgcgcggtgaggtgaggcgaggaaaagaggattcgcaccctcctcatacggaccaattcacctgatcggagccatggccttggctagccgggccacgcccacgagcataatcttctacgtgtcggaccacgatcgccaggaacaccagctccaccacttgaagtacttgggaggaagcacgaccatagcacaaagaggtagtactgtaagcatgcatgatcctgaaagccaagatgacattagcataaaagtcgtacctgctgatgaatcaccactagaggagacatatgcagtcacctactaaagagcaggaatccactgctgctgactcanaaggtttttcaagagaggagcttggtcgcctggtagc

SEQ ID NO: 41042 - DNA, 406 bp, Oryza sativa
  Clone ID: uC-osroM202033h07a1
tttttattccgaaagggcaaggattacccaaatagcttattattcgtcaaacaaatgataatatacatggtacaggaacaaatattgtgtaaagagaatgctcattagttgtaaatacatcagcggtaattcagcattctatcaaccatactaggtgcaaatgaaaagtcttatcggcaagattccgtcaggaggatttccacaatactagggaacagttcaagcttcaaggaggaaattcagcaatctatgttgtgcaaataacctttgcttttgcaactcacctttagctgaggacatgactgccatagtcttgattgaatttttcgtatctatgtacatgaagatgagcagatgggcgtgtattccttagtgcaagctcaatgtcttctgtcgttactggacc

SEQ ID NO: 41043 - DNA, 557 bp, Oryza sativa
  Clone ID: uC-osroM202033h07b1
gttcttcttctcatctcctcccactccagctctgcccctgagccaagaactgagcagcagagagctcgtggtctctttgccagcttctcctcagtcctcaccaagctgttcttgcagagaaaacatagccaaagagctaatttgagctcccaccatgaagtacgtgctggtgacaggaggggtggtgagcggcctctgcaagggcgtgaccgcgagcagcatcggcgtcgtgctcaaggcctgcgggctccgcgtcaccaccatcaagattgacccatacctcaacactgatgctggaaccatgtctccgttcgagcatggtgagggcttcgttttggacgatggtggagaggtggacttggaccttggaaattacgaacgttttctggacatcaaattgacccgtgataacacataacccgggaaaaatatatcagtcagtcataacaaagaaaggagaggagactacttggggaaaaccattcaggttgtgccacatattacagatgaaattcaagattggattgacgtgtagcgatgaatcccgtcgatggtaa

SEQ ID NO: 41044 - DNA, 386 bp, Oryza sativa
  Clone ID: uC-osroM202033h08a1
ggttgttttagtaataaacatggttgtataatggaccaaactagcagtggcaaattatacttttgatgccctggagcacctggtgctacaaaccggctaatgtgctaacagatagttgttgagttacagtgatcgagagcacccattttatgggatcagtgctgtaacactttctactataccatagaccccgtagggtgcctgactgctgcaaaagaggatgacaccgggcatgaaggatggaaatggtctctcagctgaaccactggatacatgaaggaggaggtttttgcattgctgatatcctctgattcagaggctgaggcacctgcaccttatgccaggggagggttgcctccacaggggtggacttgagggtatgcgtg

SEQ ID NO: 41045 - DNA, 334 bp, Oryza sativa
  Clone ID: uC-osroM202033h08b1
cctcatgtcagtttcatctgctcaaatagaggagagtggatttgagactgccactgtggcagatattttgaagtctaaggggaagagtgctgatggatcttggctctggtgcactactgatgactctggctatgatgctgtcaaatctatgacgcaacacaatgttggagctctggtggttgttaaacctggaccaggataaaccaactgctggtattgttactgggagagattacctctagaaaatcatagtgcaggggctatctttcaaggtaacttaagttggagacatttttgactgcatagaacccgctgatcatggtgaagcctgata

SEQ ID NO: 41046 - DNA, 352 bp, Oryza sativa
  Clone ID: uC-osroM202033h09a1
aaagggcaaacgaacggaaacccttgtttttttaaccttcatgggttgtcaaaacctttcaatttttccaaggggttcattagaactgggaactttttaacatttttttttgtaacttggacattgacccattttaattaaacttggaacagggctttacgggccctttttttttgggggcaacaactaatttcaggatagggcccttttttcatggtttcatgaacaaacccccaaaccattaaggagttttacatttccaaattttttgggccccacaaatccttttttgacaggtttttttttggagttctttaaagggttggcaatgtttttttcacacgatttttgg

SEQ ID NO: 41047 - DNA, 476 bp, Oryza sativa
  Clone ID: uC-osroM202033h09b1
aaagctgcatcgcctgcccgacccgaactaccgggctcgacccacgcacgcggcttatttttggagcaagacgctttatgctagctgcaacgaaagattcaagaaggagctgaacggcatccagctggaagtgcatgctactgacgcccgctaaatcagcctagatgcgctcaaagatcgtgtgaaataagcattgccatgcctttcatgatcttgcaatacggactggtccattatggattcgtgagtgactatagatttggtagagccagactggatgctagttggtgggctggcccatctctcgcataagcttgagactgtacacgaggtatctcaagcggtctcacaagcacgggacatgaaagcgacttaacagaggatggcgaaagatcttgatggagtggggaaaatcgctcgcatggcaaagacaaaagttgatgaattggaaaaagataactttatcaacagaccaa

SEQ ID NO: 41048 - DNA, 409 bp, Oryza sativa
  Clone ID: uC-osroM202033h10a1
ggggcctcctttcaaagttgttttaataatataatagatagatcccaacaaaagtacaccacccttaccctgatcacactatcacacacgtcggtatccatacaaccaatatgaccccaggcacgaacaatcctaattgtacggaaggaaattcgatctttagtgcaggagaattgtgaaaaggaaaaagacaatcattttggcacaagcaggacaacctcaccaggcagcaggaatcagacgcaattcatgtgggcgcgtacgctgggctacccaacggctgcggtggtagtcggtatcacgagggagccctgcggcggcgccggctccgacggctcgacgtagctggcaatgtccctcggcttgacgtgcactcgcagtccattctttatgaaaagcgttagcgaca

SEQ ID NO: 41049 - DNA, 473 bp, Oryza sativa
  Clone ID: uC-osroM202033h11a1
agttcataaatatactattcataactcagaaacactcagattgttacaaacaacagtctagcatctttggggtggcatagaaaaattgagcaaatacgtttacagggaagagtggtaaaagaaaatctaccgacaaatcagggtgaggaatttcgcgatatcctacagcttttgttcaaaaatttttcttgccaaactaatgctgcttcggtggcaatccgagtgctgaactccaagaattccagtttcatatgctattctattcatataataaacctgttaaacctctcttgtgagtatggctgtatggtgagagttgttttccttgtagcaagttcattattgtctcaccccataatttagagttcatcatggtcacgctggttcgaagatgccttgagcttctgttccaattccttcagtttttgttcatcgcaaagcgctggagtcgataatacagccacatactcgca

SEQ ID NO: 41050 - DNA, 468 bp, Oryza sativa
  Clone ID: uC-osroM202033h12a1
tttgttttagtcaatgaatctactatttataactcagaaacactcagattggtacaaacaacagtgtaacgtctttggggtggcatacaaaaatggagcaaatacgtttacagggaagaggggcaaaagaaaatctaccgacaaataagggtgaggaattaacagatatcctacagattttgttcaaaaattttttttgccaaactaatgctgattgggtggcaatacgggtgctgaacttcaagaattccaggaacatatgctattctattcatataataaacctgttaaacctgtgttgagagtatggctggatggtgagagtcgctttccttgacgcaagctcattattggctcaccccataatttagagatcatcatggacacgctggtttgaagatgccatgagctgctgtttcaattccttgagtttttgttcattgcaaagcgctggagttgttaatgcag

SEQ ID NO: 41051 - DNA, 451 bp, Oryza sativa
  Clone ID: uC-osroM202034a01b1
ctctctttctctctctctctctctgaatctctggatctctgaaaactctgaacattccaagaactcataagttacctgtgatctgtgaagcttgagctgaagctgtgacagtgtctcactgatcgttgatcactcagcttggctgctactgtgcattcactgcgtggttagctagctaactgagcagaagagctttagcaatggcgacgccggggcagcagctgccgccggggttcaggttccacccgacggacgaggagctggtggtgcagtacctccggcggagggcgctgtgccggccgctccccgccgccgtcatcccggacgtccacgacgccgccgtgctcgacccctgggacctccccggcgccggcgatggtgaggcctacttcttcagcttccggcagctcgcggcggctagcggcggctgcgggtggcggaagaggagggc

SEQ ID NO: 41052 - DNA, 407 bp, Oryza sativa
  Clone ID: uC-osroM202034a04a1
cggggggattggaaaaagtcagggttcaataaatattgcttcacttgtacaaagtacagataaaaatacattgatacatgacacggagagagccatgcacaccacttatttggacacacagagggtaaggctgcagagaaaatcaagcaacacaagctgaactcacggccccacctgtcagcctttcactggtcgaggccggagacttttgtgaaaaacagcaacaccactcattgcaaaagaagacaaattatttacacacacaaattgaccacacggcggccggggacgtacggtgaggtttttgtctcctccggggaagtttgtgatgagggcgatcagcccaagagggggggctttttttttccggtgggatccttcgggcttttggggggcctttttttttt

SEQ ID NO: 41053 - DNA, 377 bp, Oryza sativa
  Clone ID: uC-osroM202034a05a1
agcaaccgggggacgactatcaaaattacatgataaaattattattgtcttgaattatggaaacgatgataacaaatccttttccagctacaaaagaaccagcataacaacaaagaattataaagttgcttaagtaatctctcccttcatcttaaaaagagctatttctagggggcctaggccacagcaacacttttcacttaaaggggacttttcattctgggacacaaaagcttccaggatcaaattacttgggcttgcccgtctcgacaggaactattggggggggtagtttatcccagggctcgatccaaggggcccttgcattcgcaaggttggcgaaataaggggccaattttgccaggcttttttcctta

SEQ ID NO: 41054 - DNA, 511 bp, Oryza sativa
  Clone ID: uC-osroM202034a05b1
ctcaccaccatcacctccttcttctcctcctcttcctccgcgcgcgcgagatccagggagagggagagggagagatcatggcggggacggtgacggtgccgtcggcgtcggtgccgtcgacgccgctgctcaaggacgagctggacatcgtgatcccgacgatccgcaacctggacttcctggagatgtggcggtccttcttccagccctaccacctcatcatcgtgcaggacggcgacccgaccaagaccattcgcgtccccgagggcttcgactacgagctctacaaccgcaacgacatcaaccggatcctcggccccaaggcctgctgcatctccttcaaggactccgcatgccgctgcttcggctacatggccttcaagaagaagtacgtcttcaccatcgacgacgactgctttgttgccaaggacccatctggcaaggacataaatgctcttggcagcacataagaaccttctcagcccgtcaccccgttttttttaacacttgt

SEQ ID NO: 41055 - DNA, 77 bp, Oryza sativa
  Clone ID: uC-osroM202034a06a1
tttttttttggggggttttaaattttgggggtttaactatctatttttttttggtggaacatttttttctctcattt

SEQ ID NO: 41056 - DNA, 236 bp, Oryza sativa
  Clone ID: uC-osroM202034a07b1
tttggtagcaatcgtctccactctcccaccaccagagatcctttattcacacactctgaagctgagtcatggcggagcgcggtggttagcgtggctgtgagcgcggtgggttcggccgcggcttcggacgcggcggtggtggagaccgcggagggcgccgtggcgggctccgtcgtccgtatccaggaggaggagaaaaggttgcccttaaccaagtttggacgtctcgagaagga

SEQ ID NO: 41057 - DNA, 131 bp, Oryza sativa
  Clone ID: uC-osroM202034a09b1
ctttgcgctctctctatctctctctcttccaaaaccctaaccctagcggcgggcgggagcggcggaggaggagggcgcggcggcggaggggtggtagaggaggtgggaggaaaggaaattatgcagagctc

SEQ ID NO: 41058 - DNA, 326 bp, Oryza sativa
  Clone ID: uC-osroM202034a10a1
gggggggattaaaaacattggggaacaaactacaagagtacatgtttgacacaaatacacaattcaaatttaaaacactaaagagtccagtacaggtgcacttagaagggcttgaagaagcataagctattacagatagtttttactactaacagaaaatttagaattgatgccattgacatacaccaaacaacacattaaagaccctaaagctggtcctaaactgaaaaccaacagctgaatgcatattcattgggcattctatctcatgagggtctttacagcggggtaaattcttggttttttaggactaagccatagaggga

SEQ ID NO: 41059 - DNA, 377 bp, Oryza sativa
  Clone ID: uC-osroM202034a11a1
ggggggatatttaattaattgggggcaacacataattaaattgcctcccaatcttatacatactacacaaatgtgcattacctaaaacaaaaacaaattaaccacccacaacgaaaatcaactaatcaccatcttattcatttcccagacgatcgcaagatgtctttttcttcctcttgctatccatttttcttctcttcttttgctaaacaaatcaaattagcagtagctagccggccattctccgggcgccgtcgccgtcgtcggcgatgatctagggcatgatcggcgggtggcagtagggcccgttgacccacccgtcggcgatctgcttgtacgccgccttcgtgagaaggatgccgtcccagtttaaccac

SEQ ID NO: 41060 - DNA, 351 bp, Oryza sativa
  Clone ID: uC-osroM202034a11b1
aagttggtcatctttgcttgagctgaatctaaacctttgcaacaatggcggcgcgtgttgttgtggcgttcgcggttgcgtccgccatgttcgtggccgtctccggccagaagttcaacgccatcttcagcttcggcgactccatgtccgacaccggcaacctctgcgtgaacggcccccccgccggcctgacgctcacccagccttcctacggcgagaccttcttcggccgtgccacctgccgctgctccgacggccgcctcgtcgtcgacttccttgcggagaaattcgggctgccgttgctgccgccgtcgaagaggggcggctccgacttccggcgaggcgcgaaca

SEQ ID NO: 41061 - DNA, 479 bp, Oryza sativa
  Clone ID: uC-osroM202034a12b1
tctaattttctatctgctgaagatatgagtgctgtactttctatgcagctgcataagagtgtcggacttggaatgactgcaaacatgcatctgactagcatgcatgttgagggaaagattctagtcggtgtgaagtttgtccggagttggccatttcttggccgtgtaagactatgttttgtggagcctccttattttcagatgactgtaaagccactcattggtcatgggcttgatgtcactgagtttccaggaatttcaggatggctggataagttgatggatactgcatttgggcagacattagttgagcccaatatgcttgttatcgatgtggaaaaatttgtatcgactccctcagacaatgactggttcagcattgaggagagaccctctgttgcatatgtgaaacttgagattttagaaggaccgacatgaaaccatctgatatgaatgggcttttccaccctttatggaaa

SEQ ID NO: 41062 - DNA, 486 bp, Oryza sativa
  Clone ID: uC-osroM202034b04a1
ggggatagtggagactatatggtccctctaattttatctatttcatatacacataaactaatagacaacatatacaacatgttacctctaataaacaaacccctaattagtgctatcatatttgttatagtgtacatatagaggctacctcttgcacgagagatgcctcatcttctccctttttcatcacttctcttctcaaactcatcacataatcctatttaattaacaatcttagaggcagcacattaaatttcattacgcttgctctaattctatttcatgagcatggtctgcaaatggatcctttgcctcaaaacatatatttagtagttgcagacaagcatccttgccttaaggctgcctttcatgttgaaccttgcaatgaaagccttcactttacgattcagtttattaagttggaaacccaacatctttctactcaatcattttccttcttgattaccttgccttgggaaattggtc

SEQ ID NO: 41063 - DNA, 420 bp, Oryza sativa
  Clone ID: uC-osroM202034b04b1
tttttattaaacgccaaactggattcctgacgcgtgcgcgcgcgcaaagccaccttctctacaattcgatagttccagaaccgcggtattaaggcggtctgactgccaggcgctggcctcatgcaaaacgggtgttatagcactagccatattatgcatgaggacttgactggcacacagggatgcctgcattaagatcggcatgggttaccctgcttgactgggttgcacgctggcgacaccgacgtgcttgctcatatgctgcaagagtcatagtatcatcctaggcagtgagataaaactctccgagggggagagcttgggcgagcgtgggatccacacgcaatcatggcttcgatgcttacatcagacatagggtttgaactttcactccaagtaccaagttaaacgatgtgattg

SEQ ID NO: 41064 - DNA, 231 bp, Oryza sativa
  Clone ID: uC-osroM202034b06a1
ttgtttcgcgcagatccagtccgtggcggggggggttttgcggatcagttgcgcggtggctgcgactacgtggttgcggcccgatgtgacggcggcggtgcggatccagtccgtggtggcagcggcggcgcggatcatgtccgcggcggtagcgactatgtggttgtggcccgacgtgactgctgtggttcggacgcggaccgtggcgacggcggcagacacggtatccag

SEQ ID NO: 41065 - DNA, 433 bp, Oryza sativa
  Clone ID: uC-osroM202034b07b1
tttcttctcctcacccctcgcaccccctccacctcgccgtcgccgccgactcgccggggctcgccgccaccggtggtgggggggagctcgacctcctcgccccacgcgcgcgtccggacgccgtcgttctgggcgcgggagagatccgtccgtcgccccccgctgggcttgcgccatcctctcgccgggtgatttgagacaatcaagatggctttttcatcagttttcaggagaggaaatgtcaaagaattgatctcaaatgtttcggtctacactagcgcaacagagtcatctggaggattgagcttgatttttaagcgttgggccaccaaaaagacagctggatcaacaaaaaatggcccggacttttaccctaagtatttgggtgttaaaaagtttggccgagagaaagtggagccaggaaacattatta

SEQ ID NO: 41066 - DNA, 471 bp, Oryza sativa
  Clone ID: uC-osroM202034b10a1
agacttcagcatgtgggcgagatatcccacagcagcatcctgtgatttatgggatgatgagctcgcttgatcccccacatcctttccaccactgctccctggtcgggaatcaggtgtatcaacatcatccaccgcaaaaggaaaatctaaatcatcagtatcatcctgcattgacaatctgcttgaacttcttgaaaacccaagccgtggggaaccactagaggaaaaaacacctgagaatctgccagattcatccctactatccttaatcttaatcttaggaacagaaggcaaattagtgtagagatcagccatccggatccctgtccggcctgtcttcatcggtgtcttatgccccccaaagtcgcctctgatggttttcggtgaaggtggaggtagcatgaacccccttgacgggatccgacctgttccgattgtgaacggggccttttccaccacccggtatgatca

SEQ ID NO: 41067 - DNA, 275 bp, Oryza sativa
  Clone ID: uC-osroM202034b11a1
cgattggcataacaccacatgattcgaccagatggatttgagctccaaggctgcaaaacaccatattacagaacatgcatttcaaatcctgaaaatagctgcacttcaggatcaactaccgttttcgaggtttatggacatgaaaattccaggggttttcacttccagcaactaacagaaatgaaattgaaaggggatgaagctacccaaattccagtcgtccaattccccagtctttcccggtgggttacaaaactggaccttattttttacaa

SEQ ID NO: 41068 - DNA, 521 bp, Oryza sativa
  Clone ID: uC-osroM202034b11b1
tcggcttcacaagaaagctcactgcgctgcaccaccagccaacccaagatcaacaggaaccagagagagagatgaacgccgacttcggcgcgcccaaggacctcgcggggggcctccagcagcggaggtctctctaccagcccaccctccctccctgcctccagggcgcaacggtgaaggtggagtatggcgacgccaccaccaccatcgacccaacctgcgccaacgtcgtcgcgcaggccttcccccgcacctacggccagccgctcgtcagcttcgtcgcgccgccgcccgacgccgtcgacaaggaccgcgccccgatcagggtaggggtggtgttctccggcaggcagtcgccgggaggccacaacgtgatctggggactccacgacgctctcaaggcttacaatccttatagtggtctctatggattcgtccgtgggactgagggacttgttgcgaacaagacaatcgagatcacggatgatgtttttgctcatacaagacccaagtggttttga

SEQ ID NO: 41069 - DNA, 296 bp, Oryza sativa
  Clone ID: uC-osroM202034b12a1
ggggggggtaagagtttcattaatgatttatagggactatggagaattcatcataatctccattgcttctaattcagatctcttttggttcattacatacactattgttccaatgatacccgctaagggtgaaatacataatataactataagtgctatgataccacctggtaaactgccatttggtgttttggatgaatcaaagggaatgttttccactggtccttttggaactggctgggaaggattaggacttggttgtttagcagggggagggctctgttgtggcggaattg

SEQ ID NO: 41070 - DNA, 288 bp, Oryza sativa
  Clone ID: uC-osroM202034c01a1
cacgcacacaagcgcgtgtcctctatagattgcgcccccttttttttttttttttggtttttttacaataaaaccaagttaacttttgtgtaaaaatggagcaatggatcatgcaaagctaacattagtttattattgggacccaagatttttactccaaaaaaaacttccaattggaaccctcttattgagtaccttcacaaatatgtgaccctgcaggtcactttggagaggtttccattcttaacttttttcaaaaactgttagtaaccaaaaaaattttaaaaa

SEQ ID NO: 41071 - DNA, 512 bp, Oryza sativa
  unsure (1)..(512): unsure at all n locations
  Clone ID: uC-osroM202034c03b1
atcattgcatatgcttatcctacaatggaatattcatttgttagtcctaaagatagttcttatctcctcagtcaaacatatcatatgaccttatgtgtgccttctaaattgggaattttgtggatgtgcaacttcattcaatagcatttcagaatttgtcattgaatttcacctcgagtgtgagttatgttatggggccacatgtaattgaaagggtgctacatcattgtatgccacataacttatggaaaatccttgtttcatcaatataatattgaaccttgcatatctatagatgaaaggtaatgcaattaataccgaacctttcatgcagtaggatataaattgttcgtatttaaaacttttaaatattttacatatgtttgttgatttggccctctttcaagatgctctaatactgaaccaccttctggtggcacaaaggaatgatcctcgtatcggntttccttgttcatgtgactctggcatcttacgtagcatcaaaccaaata

SEQ ID NO: 41072 - DNA, 326 bp, Oryza sativa
  Clone ID: uC-osroM202034c04a1
cactggggaagtatcaggttcaactattatagcatcaagccatcaacaaacttttgataatacagacattaacggcactttcagttcatctgatcctctcgggagaaaaagtcaaaaagaaaaaaaagcaaccacaggtggctgcatgctctatggaacgatatggagttcactgacttcgagatataacaaagcaagctggccaaacatgttatcaacttaaaattggcagcattaactccctaccgatcatttggttggaacccagaacacttaaccagaagacttgacggtagcaaacttgattatgtccacaaattcaggct

SEQ ID NO: 41073 - DNA, 396 bp, Oryza sativa
  Clone ID: uC-osroM202034c05a1
gggagcccatcatattatattcatttatattagtatcaaataacaagtgtgctaagcccatataggcccaacaatcaaacacaataacaccccatatagcacaacccgccaaacatccaatacaacacaaattttacacccaaactaggttcagttgggtgagcaaaacataacagtcccaccatatcctagatggcaaaacaaagttttacatcactgaccatatttacaaagtccaatcatatcttgccctttttgggcaggattatcaatgaacttccatttcaacaggttcattaaaaactcgtattgctgttgcaatggcacattttgaaaaagaacaaatgcagggggtggagcatccttatcttaggttgcttcttttcttttttagca

SEQ ID NO: 41074 - DNA, 401 bp, Oryza sativa
  Clone ID: uC-osroM202034c06a1
gggggcagatagaatgtacgagaatattgacgattattctatctggtatctacagcttcctttgaagaaaaagaaagaaagtaaccagccggtacaggtcgaactacatgcccaatctcctaataaccagacatgactaaactcttccggatgcaagaggtgttacttattggatttgcatccggagcagctcttgcgtcttcaaagagaaaccacccattggaggtgtttatatgttcaaaaaagttctgttctaagccctggcaactaagttcaggtggttcgaggcagcatgcatatgcgctccgaccagccaggcatggtaatgattcatcagatgagggaaaaaagaatcacgggagaattatcgccgaccatttgcccaacttctaaagggattt

SEQ ID NO: 41075 - DNA, 283 bp, Oryza sativa
  Clone ID: uC-osroM202034c06b1
gtcttcctcctcctgcggttgctatcggcacagataagatttggttaggagctgttttgtttgttgggttgaaatcgtcaagtaacgtggacgtgggggtgaagcaaaggaagggaggggagattgggtttgggtggtgtgaggattgatttgttttattttcttaggggggcaccttccttgatggctttccttcttaaccgttgttttatgataatactctcttatttagatcccactgttcgcttacccacacacaccttccgtttcttgttctaccatt

SEQ ID NO: 41076 - DNA, 370 bp, Oryza sativa
  Clone ID: uC-osroM202034c10a1
gggttaaacaattacaatttgcaatttccaaacacgatactaatacaaccaaacacccaaaaaaaggaccacctggaacacaccagttcacacaggacgcacatccgctggctttttgtgccagagttaaatcaccattaatttcaaagaaaccacttcgtaactggacgggatcattcaagcaccgaagctaccatatatgcccttgaattctccgaattcagtattttaggggcccaagcccatggcaatggcgacgttgagaatgaagccaacttctatggcggtgaggttgcatccgcccacctgttttcatgcgccgctgtagtacgggctgttgctaccagcggctgggcgccgaattcgaacg

SEQ ID NO: 41077 - DNA, 539 bp, Oryza sativa
  Clone ID: uC-osroM202034c11a1
gaagaaagtgcaatttgtatgggtaaagaattgaggttcaacacaacagaccgatcagcccagaaaacaacactataaaatagtattcctgttaaaaaaaataacactatagattgacatgtacttagaacatctccatcactacataacatacaagatcgacatgtacatatatgtatgcacagaactgcagctcaatcagatagtatttggtgggcttttgtaatatttcttccacggcccatttcacttgtgccctctgaaatacatgtatactttctgaagaacccaaatgctcacaagtgtctccaagcaaaacaaggcaaatccgacaaagtaaaagatcccgactattgcatgatcagagaaggtgtcaattgcagccaatataccagttaatgattttccacgaaatataactggtggagcgatggcagcaaatacacagaaggcaatgtgaagcatgtagcaaaggaaaaaccatccaaagctgaatgcgctatcagttcttattgcgcggtacagaggcctttaccaca

SEQ ID NO: 41078 - DNA, 445 bp, Oryza sativa
  Clone ID: uC-osroM202034c11b1
tgcttcaaccgatttcgcagcgccagcccactgattcctcaccgaattttttcattttttttctctctttccattctccccggcgatcgagtagccggcttctgctcgccgcccgcgcgccggagggaggcgaggtccaaagccggcgaggcgccatgcaccacgaccccaaccccttcgacgagggcgccgacgagaaccccttctccaatggaggaggtggtggagcacgtcgtggtggtggtggcggcggtggtggtggcggtggcggaggcaagtctcagttctcgttcgggttcggcggcctcggcggcggcggcagcaagggcggtgccactgtcgacatccccctcgacaacatgagcgattcgaagggcaaggggaaggagctgttgcaatgggaggcagatcttaagagacgagaggcgggtatcatgagaaggga

SEQ ID NO: 41079 - DNA, 492 bp, Oryza sativa
  Clone ID: uC-osroM202034c12a1
ggaggaagttcaatttgtataggtaaagaattgaggttcaacacaacagaccgatcagcccagaaaacaacactataaaatagtattcctgttaaaaaaaataacactatagattgacatgtacttagaacatctccatcactacataacatacaagatcgacatgtacatatatgtatgcacagaactgcagctcaatcagatagtatttggtgggcttttgtaatatttcttccacggcccatttcacttgtgccctctgaaatacatgtatactttctgaagaacccaaatgctcacaagtgtcttcaagcaaaacaaggcaaatccgacaaagtaaaagatcccgactattgcatgatcagagaaggtgtcaattgcagccaatataccagttaatgattttccacgaaatataactggtggagcgatggcagcaaattcacataaggcaatgtgaagcatgtagcaaaggaaaaaccctcccaagct

SEQ ID NO: 41080 - DNA, 241 bp, Oryza sativa
  Clone ID: uC-osroM202034d02a1
ggaaaaaaaaaattgtccgtgcaaattaacaaatgagcaaatcccaaactggcttaagctagctagtaggctagtagccgtggcatttggacatgatgggcggttcggcgaacgggccgtcgagcacgccgtgcgccatgatccggtacaccgcctccgtcatgtgcaggccgtcccacgagatgcgccgtgacgggtccgcgcactgcgtcgcgccggggtcggagcagtgcaacggtga

SEQ ID NO: 41081 - DNA, 143 bp, Oryza sativa
  Clone ID: uC-osroM202034d03a1
gagataacacggcatgcgcacgcgcgcgagcgcgtgtcctctatattgttgcgccctctttttttttttttttaggcagtaacacaacaaaccatgaatttggaaatgaaggatgcgacagggagggaaaacatcagcaatac

SEQ ID NO: 41082 - DNA, 489 bp, Oryza sativa
  Clone ID: uC-osroM202034d04a1
tcctctagatttgtcgccctttttttttttttttgaaggggagagagtagtatgatgtatatatactccgtatgtgagaacaatatgatcttagcaccgacatgcagcttatactagcttagcttatggacaaaggtctccatatccgatctggtacaacatttgccatgattttttttttcaatttttaccagttagaatcgatgcgctgcaagaggccggttgatgttcagccattgaatttgcttctttttttttttccttgtttaagatccttccaaatcaagggagattctgattcggtttggcagtcttacttgtaaaattgctagttagtagtttagacactgcctccacaactggagctttcgaaatgttgaagtttgtctgacattctggtcccggcccgtactttcattgacaccgatgtataggtcccttggccatttcttccttgcttcaagatcctcccattccaagggagatctc

SEQ ID NO: 41083 - DNA, 411 bp, Oryza sativa
  Clone ID: uC-osroM202034d05a1
gttgggtgttttttttgaaaaaaaatgaagtttattcatatgatcatgatgagcacgtacttggagaaaactttgttacatacatgcatggctcgctatataaacaaaacaattaattaatgaagtgattgaaatcaagaaaaaaaaagaagggacaggtaaatcttacgataatgatctacatggaaattaattataagatggtcacggccggaatcaaaagctgaaatccataatcacagtctcggcgagcagctgatgatatatgacgataattaagagagatgattagttaaccacgttgcacttcttcctgatctcgccctggctgccggtgagcacttcgacgccgcccatcttgaccatggaggcggcgaaatctgcgaagaacttgtcctttgtagccgccgc

SEQ ID NO: 41084 - DNA, 436 bp, Oryza sativa
  Clone ID: uC-osroM202034d06b1
cttcattctattctcttctagccttagcctagctagctagctctgttgtctagctctgatcgaggttggtggcgatcatggcgtcgtcgagggtgatcctagcgctgctgctcgcggcggcggcggtgatggcgtcgtcggcgcagctggacgagaagttctacagcaattcgtgccccagcgtggaggccgtcgtccggaaggagatggtgcgcgcgctcggcgccgcgcccagcctcgacggcccgctcctcaggatgcacttccacgactgcttcgtcaggggttgcgacggttcggtgctgctcgactcggacgggaacagcacggatgagaaggacgcgacgccgaaccagacgctgcgcgtgttccgcttctgcgagagggtgaaggccgtccatgagaaggcatgccccggcaccgtctactgcgccga

SEQ ID NO: 41085 - DNA, 333 bp, Oryza sativa
  Clone ID: uC-osroM202034d07a1
ggaacaaaatccacaatcttatttctgtcaaaaaacgagggattaaacttacattcataccttttgtataggccaccgatacaccctagatacagcttacaatgctcattgaaccctatatgcagtaacagtgtttctacgcgctacaaaactcttcgtaaactggtgaatactcaccttgatgagcccacagcccagtaaacaaagaagcagatcacctagtgtgaaaaggtaatctatgtatgtatacgtcaaatcatgaaaacaggaaattttctatttcctttgtaacatcctaccgtatgccttttttacctgtgcaaggggaacttt

SEQ ID NO: 41086 - DNA, 458 bp, Oryza sativa
  Clone ID: uC-osroM202034d08b1
ttgttacactgccaatgtgatccgttacttccccacccaggctttgaactttgctttcaaggattacttcaagaggctgttcaacttcaagaaagacaaggatggttactggaagtggtttggtggcaaccttgcctctggtggtgctgctggtgcttcatctctgttttttgtgtactcccttgactatgctaggacaaggttggccaatgatgcgaaggctgccaagggaggaggtgaaaggcagttcaatggccttgtggatgtttaccgcaagactctcaagtcagatggcattgctgggttgtaccgtggatttaacatctcatgtgttggaatcattgtctaccgtggtctgtactttggaatgtatgattctctgaagccagttgtactcactgggtctctccaggacattttctttgcaagctttgcccttgggtggctgatcaccaacg

SEQ ID NO: 41087 - DNA, 473 bp, Oryza sativa
  Clone ID: uC-osroM202034d09b1
tttcctttttccgcagagcttccagtgaccccttgtgcttggaagacaactccgtccaacatggaattgaaagatgcccattcctaaggaacatcaatgagcctacaagtttttcattctcgtccgttaattttcctgttcctgtaagccctttaccttccatcctcataatcttatcgcatgtttctgaaaaattggatgtattgtggatgccattgctcaactatatcatttgctgcttgtaaaggcaagaggagacaagggttcaatttttgaagatggacccaattctgacatggcatttcgagttttccatggccaagatggggttgttccactttcacatggaacatttgagcgaattgagaagccaatggcaaagtccaatccttgatttaaccccttggcttgctaagcagctaccatcagtctttttgatattgaggttttttcagctttggtgatttttaaat

SEQ ID NO: 41088 - DNA, 344 bp, Oryza sativa
  Clone ID: uC-osroM202034d10a1
actcacaaagaaaactgtattgaatttggctattttaacatgttcatcaaaagctacagagaatcatccactttgaacagattatgatttacaaggctcttggcttctacccaaattacatcactaaacaagtcacttctaccaaaaaggaagttgtaggaacaaaaatattcaacaatttgcatgtgttggctgtctattccgccttgtcgagactatttgtcccagccatcctctttcatgccaaatagccatttctgggggagagggccatatatggaggtgaacttcgccaagcatttcgttctgatgtcatagtgcttctgcgtgtcttggctaataac

SEQ ID NO: 41089 - DNA, 398 bp, Oryza sativa
  Clone ID: uC-osroM202034d11a1
ggcagccgccgccgcggtggggtctggtggcgcggggggctccgggcggaggctgcccccgccgtgctggacgcacgaggagacgctggcgctcatcgaggcctaccgcgataggagggaggggctccgcaaggggaacctcagagcctacgactgggacgacgtcgccggcgccgtcaccgcccgctgcgggaggttccccacggcgacgcacaagtccggcgtccagtgccgccacaagatcgagaagctccggaagcggtaccgcgccgagagggcgcgcgccgccggccgctccaagggccccaagaggcccttcttcccgctcctccacgacctcgccggcggcggggcgcccgaccctagcccaaccccatcatcaagatcaaatccaaggg

SEQ ID NO: 41090 - DNA, 238 bp, Oryza sativa
  Clone ID: uC-osroM202034d12a1
attaacaatgttgggacattagatccagtgctcaacagcacaaacaatacaaacaggtttacagtttctctgcttaatatttgcagagtctgaatatcagagcatcagggaagggaggagcaagtagcatgcaggttcagacacaagacttcaggcagttcgatttacattgatccttataaaagaccagcaaccataactattgacgaagctaggcgaaccagcgggtgaagactga

SEQ ID NO: 41091 - DNA, 346 bp, Oryza sativa
  Clone ID: uC-osroM202034d12b1
tttggtagaggggagattccgccgccgacgagaggtgggggggagtgggttgtgatcgtgaggaggcctctcatccctagacggtcgagttgaaaggcggaaaagacggatagcgttgaagcggtcgggcgcggccactcatctgcgtcgtccacgcccagtgggggagccataacttctccagcgacagcgatcatcccagacccacacaactagacccggggcgctttcctcgtccggctgcaatccctatgacctactgttcctcgcctgcctctgtcgactgtaagaccggtcgcccccgccatacaccttctctaacatccaatcaacaaaaatcttttcc

SEQ ID NO: 41092 - DNA, 501 bp, Oryza sativa
  Clone ID: uC-osroM202034e01a1
aaaggatggaatcgagtagcaatactttcaccccaaaatacagtttagcgacaatatcttagaaaagccgcttgctttgccgccatggctggcaagctgagcagagcagctaacacaaagaacacgagatcactataaaccaaacggcaacgaacgaagaaaatacagggtcttttttgtctgaagatacacgaagcggttcgttttcttttatttttagtctcctctcctcctcgatgatgggtgtatggcaatggcaatggcgatgggatcttggcttagttgatgggaaggggcttgccgttccactccttgaggcagtcgagcatggggtcgatgagcttgccctggctgatgccgaggaacacctttgtggactcctcgccgggggacttgagctttttgccggtgaggaatacccagccgagctccttgcggacgaagcggtagagcgggaacgacccggttttgacgatccggttggcgaacgggggcggtgcc

SEQ ID NO: 41093 - DNA, 385 bp, Oryza sativa
  Clone ID: uC-osroM202034e02a1
gcaaaaactcggcccttgttataaacaacactccaacagtttattcttatccaggttgcaatgcatagcggttttacagtcaaatccatactgtactggtataagcacaactcatgtgccaaaatttatttttgttcatagagcggaaaccttttttttattacattggactggcattcactccataagggtttcttctttgccttctaaaacaaatcctttggcccttctcttaatctttcactggagttcctttaaaaaagttggtttttttaatcaaaaatccttttttctagctttaaagggtcaaggaaagaggcatccttttgatttgagcccctggtagtggacttggttgctcaaaaaatttttcccccttattttt

SEQ ID NO: 41094 - DNA, 417 bp, Oryza sativa
  Clone ID: uC-osroM202034e03a1
tcgcttgttgcttcggttcgtttcggcttgtctgctgagtcggttattcaagtttcacttcataaggcttgtaaattacggtttattccacaggaaatcaagggtgataactgccatgaaagaaaccatgtgatgcataaatggtcagtcaaataggccatggaaccccgtaaaacagggcctgcgttagcttggctgttttttccaataaggctttccggccccccctcgaccgaggcattcacaaaaaaattcgatcgcttcaagttcagaatggtggtcgaaatcctcgacagggactaataaaaggttacccaggccgttctcccccctggaaagcttcccttcggtggcgcctctccttgtttcctgacccttgcccgcttaccccggataccttgtcccgccttttttccc

SEQ ID NO: 41095 - DNA, 351 bp, Oryza sativa
  Clone ID: uC-osroM202034e04b1
ttgcttttcttcagtgtcgaatactctcttctcctcgggcccaccaccaccaccgtagcaatggcgggcaacgggccgaacaacaaggaggacccgctcaactggggcgcggcggaggccgatatggctcggcaggcacctggacgaggtgaagcgcatggtggcgcagattcgcgagccgatggtcaagatccagggcagccaccctccgcgtcgggcaggtggccgccgtccgctaagccaaggacgccggctgggttgccgtcgagctccactagcaggcccgcccccacctcaaggccaagatcgagtggatacagaactgcatcgtccacagcggaaacatctaca

SEQ ID NO: 41096 - DNA, 453 bp, Oryza sativa
  Clone ID: uC-osroM202034e05a1
aatgggcaaaagccatactctctgtattaaagatccaacaggttcagagaacacgcaagctcagaactacacatcaccaaaattggagcaagtttgggggtacatatccgttcatacagtggaggatttatttctcgattctacgagctttttaactagagttcgaccgggaagtcaattacggatagaaatgagcatcctgtcttcacaaaacccatgcacacaacagtgggcatgaaccgcatgatatttaccatcaagtttagtagggctccacgggtgcgcggaacttggcaccagcgtagacagcagccgtaccaagcttcttcttaatcctaagaagctggttgtatttggcaaggcgctttgatcggcagggtgctccagtcttgatctgacccgtggccaaaccaacagtcaaattagtaatgaaggtttcctcagttttaccac

SEQ ID NO: 41097 - DNA, 290 bp, Oryza sativa
  Clone ID: uC-osroM202034e06a1
gaacagggtgaagaaaaatatcacaatattacgcccagtttgcgcgatgtttcgcaagcaaaaggagccaatgcacccaagtcatgcattacaacccaactagacaggcctactagcttaggtgcgttttcgtatgacaaaacttattacaacgcgcaaggttctagtatcccggtcttttccaaaaaactactatctgctattctctaaaagcagggcaatctgtttccacatgccgctttacttcttgatcctcctcgtacctcagcctttggagtctgcttctcctc

SEQ ID NO: 41098 - DNA, 543 bp, Oryza sativa
  unsure (1)..(543): unsure at all n locations
  Clone ID: uC-osroM202034e06b1
cttctctcctccctcccctcccctcccctccccgtccggccatggcggcgtcgctgcttctccgagccgcccgccggcgagacctcgcctcgcccctcggaacgttgaccgccaatgctcaatcggcatattctgcgaatatttgttcacaatggggtagttttgcaagagctttcagtgtaaaaccaactggaaacgaggttattggaattgatttgggaacaactaattcttgtgtttctgttatggagggaaagaaccccaaagtgatagagaattcagaaggcaccaggacaacaccatcagttgtggcctttaatcagaagggagagcgacttgttggaactccagccaagcgtcaagcagtgaccaacccacaaaacactttctttggcacaaaacgtctgattgggagancgcttgaggatccacaaacacagaaagagatgaaatgggtccatacaaaattgtgaggctccaaaggtgatgcttggtggaacacagatggcagcagacttaccagtcagatgcgcattgtttgac

SEQ ID NO: 41099 - DNA, 437 bp, Oryza sativa
  Clone ID: uC-osroM202034e07b1
ttttgtttctcaacgccggaatcttcggcactggctccgatggccacacgctgccgtcggagacggtgcgggcggtcatgctcgtgcgcatcaacaccctcctccagggctactccggcatccggttcgagatcctcgaggccatcaccaagctgctcaacaccggcgtcacgccgtgcctgccgctccgtggcaccatcaccgcgtccggtgacctggttcccctgtcctacattgccggccttatcaccggccgccccaacgcgcaggccatcttgcccgacggcaggaaggtggacgccgccgaggcgttcaagctcgccggcatcgagggtggcttcttcacgctgaaccccaaggaaggtctcgccatcgtcaatggcacgtccgtggggtcggcgctcgcggacaccgtgatgttcgacgccaacattctc

SEQ ID NO: 41100 - DNA, 542 bp, Oryza sativa
  Clone ID: uC-osroM202034e08b1
tctattacatggatccacaaccatctaacagctatgaatggcacctctatgagtatgagatcaatgattgtgatgcttttgccctatacaggcttgaattcaagtcctctgatgcaaagaaaactgctaaatcaaaattagcttgtaacccactgaatgaaatccagcagcaaatggttaggctgagtgcagatagccctgtcgaaaacaaacggtctgcccgcagcaggacaaaggctaacccaaatgatatcaatagcaacatctacttagttcagaacactacagttcaaggcagtattccaaatgcttatcaggcagtgtcacaaccggaccagatgacgtatttgaatggcaatgttgtttatgggcctcatctcccatacggttactcaactgaaagaagtgacttctattggagctcaaatgatggagcttgaagaagggtaaccatattttatcaacggcatatttggcctttaagttctacagctccagctttacttatggggtctaatttaatggcatgcccccatcattta

SEQ ID NO: 41101 - DNA, 432 bp, Oryza sativa
  Clone ID: uC-osroM202034e09b1
gtatgtagatcatgaaaaattccaatcactgtctttgaaccattacatctattacatttggtgtgtacctggaagttcaggtcttcaggcaactatatgctcatactttttgccaaaaaaagctgcaaaaatttgcatttatgcctgtgggtcctcttacaaatatttgaacatcggatgcacaagctaagcctcaaattagaaaggtacatgcatatgatacaggggaaaagcaacaggaaggttaatctaatctagcttcaactatgatgagtagttcctagacaagtacctctttactggcgcggcaagcacccctactctgtgtgggtggaaaaggacaacacaagctgcataacataccacagtaccaattaccacagtggtggcaagacgcattctcatggcaccacctggaaaagcaccaatgga

SEQ ID NO: 41102 - DNA, 433 bp, Oryza sativa
  Clone ID: uC-osroM202034e10a1
ggggatcaaaacatttctatgaccacaactttttaaggatggaatcgagtagcaatactttcaccccaaaatacagtttagcgacaatatcttagaaaagccgcttgctttgccgccatggctggcaagctgagcagagcagttaacacaaagaacacgagatcactataaaccaaacggtaacgaacgaagaaaatacagggtcttttttgtctgaagatacacgaagcggttcggtttcttttaattttagtctcctcttctcctcgatgatgggtgtatggtaatggcaatggcgatgggatcttggcttagttgatgggaaggggctcgccgttccactccttgaggcagtcgagcatggggtcgatgagcttgcctctggctgatgccgaggaacaccttgttgtacttctcgcctggggacttgagt

SEQ ID NO: 41103 - DNA, 363 bp, Oryza sativa
  Clone ID: uC-osroM202034e10b1
cttttcttcagtatcgaatcctctcttctcctcgtgcccaccaccaccaccgtagcaatggcgggcaacgggccgatcaacaaggaggacccgctcaactggggcgcggcggcggccgagatggccggcagccacctcgacgaggtgaagcgcatggtggcgcagttccgcgagccgctggtcaagatccagggcgccaccctccgcgtcggccaggtggccgccgtcgcccaggccaaggacgccgccggcgtcgccgtcgagctcgacgaggaggcccgcccccgcgtcaaggccagcagcgagtggatcctcaactgcatcgcccacggcggcgacatctacggcgtcaccaccggcttc

SEQ ID NO: 41104 - DNA, 395 bp, Oryza sativa
  Clone ID: uC-osroM202034e11a1
gtgaagcatatatggtttattttcccttttggtccacacaagcgaacagggacaaattaaacacacccacacacatggagcacacaaactaacaaagcatgcaagatgcacaaaagctgcagagcactgaaaaatctggatggagctaagctctagcctctagctataccaactttgaatgatcgaacgaacgatcagcttgctgcaagctagggcgagttttattgatggacacacagatcgatcattgatcatttgtagctagctagttttgggctcggggtttgcacatgggcccgggctggccggtgaagcggttcttgcagacgtagcgaggcggctttgacgactccacacgctggctattcttgcacgcggcggcgcatttggtcacc

SEQ ID NO: 41105 - DNA, 113 bp, Oryza sativa
  Clone ID: uC-osroM202034e12b1
tgagacaaatgaaaccctgcaacttgttctttaacatataataacaaatttattatcattaagttaagtaccactgccaatagtaatctttatttattaggtacaaattatat

SEQ ID NO: 41106 - DNA, 470 bp, Oryza sativa
  Clone ID: uC-osroM202034f01b1
ccttcttttcgaaccctttccagtctccactccactgaatcctcccacctcggctcgaaggaatggcaagcggtagtgaagctgagaagtcacctgaggttgtgctggagtggcctaagaaggacaagaagaggcttctacatgctgtttaccgtgttggagatttggatcgcaccattaaatgttacacagaatgctttggaatgaaattactgaggaaaagagatgtgcctgaagagaaatatacgaatgcatttcttgggtttggacctgaggacaccaactttgcacttgaattgacatacaattatggtgttgataagtacgacattggagcatgatttgggcatttcgctattgcaactgaagacgtgacaaattggctgagaaaattaaatccagttgttgctgcaagatcactcgtgaacctggtcctgtcaagggaggatccactgtgattgcctttgcac

SEQ ID NO: 41107 - DNA, 421 bp, Oryza sativa
  Clone ID: uC-osroM202034f07a1
ggcagccgccgccgcggtgtcatctggtggcgcggggggctccgggcggaggctgcccccgccgtgctggacgcacgaggagacgctggcgctcatcgaggcctaccgcgataggtgggaggggctccgcaaggggaacctcagagcctccgactgggacgacgtcgccggcgccgtcaccgcccgctgcgggaggttccccacggcgacgcacaagtccggcgtccagtgccgccacaagatcgagaagctccggaagcggtaccgcgccgagagggcgcgcgccgccggccgtttcaagggccccaagtggcccttttttccgctcctccacgacctcgtcggcggcggggcgcccgtccctagcccccaaccccattatcaggatccaaatccagggccccgccgccccggtcgcctt

SEQ ID NO: 41108 - DNA, 459 bp, Oryza sativa
  Clone ID: uC-osroM202034f08a1
gcaccaactattatcagtactttgcttttatggcaaatccttttgtcatttacatgatagctacatatataaagtacatagatatatactagctccttatcattaaagaaaaggactagatacgtacttgatcacttgatccctacccaaatactactacttttgtatccttgcagagtcaaactcagaactactaccttttgacttgacctaatcagggatcattactaagtaatcacctaatcccttttgattaattaatttatacatcatacacacttttcttaattaggtggggactcatatacattcacccttactaatatttttccatccaaggaaaaaccataaaaaagaggttaagactaggttaaatgattaataattcacctaattatactaagacgtgtggttcgaacccacatttcagtgactcatattgaccccttcaacaccctt

SEQ ID NO: 41109 - DNA, 411 bp, Oryza sativa
  Clone ID: uC-osroM202034f09a1
gaggcaaatgcatgcacagttttacagaagcaaagcaacgggttcccaaaggtccacacttacagtacgttcaacgtacaactgatccaagcaaatgaaacaggtttgatgatgcactgatgcgagaaactaaacggttggatcggagtcggagacgaggcgatcatggacaagcggcggcggcggtgatgagcttagtagtcggtggtggggagcttgcttttgggttgtgggagatgaagaggacctcttatatgacgccggttaggtcaccgccgatgagtgggccaacccagtacacccactgggactcccaggaccagctgacgagggccggtccgtaggagacggccgggttcatggaggcgccgtcgaacgcgcctgctatcaggatgttcgcgccgaccattg

SEQ ID NO: 41110 - DNA, 350 bp, Oryza sativa
  Clone ID: uC-osroM202034f10a1
agggaaaaaaaaacactcaaggtataagtaaacagtgtatatatcaacagtttatgtgataaatttaccttttgaaattataaattataaagtagtgcttaatttactccaaaattatcattaacaccgctatttactacaatgatcatcagagagtcaaatattatcggttttggcatctagtttcttctcagcttcacttatgccctccagttcccgcaacaaagcagtgtgctttctaatattcccttcctggacactttgaggtgcctttttgcgataaccagaagcattcatcatgtgtgtcacagcatggtgtagtttttggattccatctttctttttcctta

SEQ ID NO: 41111 - DNA, 297 bp, Oryza sativa
  Clone ID: uC-osroM202034f11a1
gggataaaataactacagtggacataaaacttcaagaaatcagcacataaaatattgcagcagcaagtcaccaagcgattaaatctagcatcagagatcactacaagattcctagacgtcaatttcagtttcaagaattccacaagaccagcctaatgggacaatgcatattacatagctctgaacactttgcatttgcttcctacaaaaagaacgatatctctggtggttgaacaaaggagaagatggcttcaccgaatacctcgtacaatgaactcaacagatgcccagcatttt

SEQ ID NO: 41112 - DNA, 204 bp, Oryza sativa
  Clone ID: uC-osroM202034f12a1
atggggtagtgtatacacatatggatatatatttacattattatcaatcgtattctcatgatgttaattttttccccttaattaaaaattacatcttatgtctatatggcataccaaagttttatgtgcttctttcccgagaaatcggtctccatgaaaggagctcagtgtttcctttcggactattagtgaacgaacgaattg

SEQ ID NO: 41113 - DNA, 443 bp, Oryza sativa
  Clone ID: uC-osroM202034f12b1
cctgctcgcttggctgtacgccggccgcgtccgccatggggaattgcttcggctccgatgacggcgaggtggaggccgtcaaggtgatggcccgtcatgcgctgccacaagcggcaatggcgagaccggtcatggtcgcgatcgcgcagcccaatgcacgcgtcgcgatgagcccagggcggccaccaactggtaagttgccgagccaggccacagccacaagcaccggcggcgggcgatcggtggctggtggtggaggccggacgaacgccggcggcgacgccagcgcggaggggaggatcctggaggcgcccaaccttcggatcttcacgttcgccgagctcagggccgacacgaggaactttaaggcggacaccgttcttcgcgagggccggttctggcgggtgcacaaggtgtgggtggacgagaggaccatgagcccc

SEQ ID NO: 41114 - DNA, 453 bp, Oryza sativa
  Clone ID: uC-osroM202034g02a1
gacaacgacaatgatgccaatattattatcaactccatcgacatcacctgaaaaaacagtaatcaaacaacacagtagctaccagaaaattgtgcaggcatggaatagaaaccacctgccatactacatggcatcgacgataaatagagctctacataatggagttctatctctcctcattttaccagcaaatctatgtaacgaaaggcaccctgcgaactgcaggggctgatacggtaattaaattgtctcccaaagatggactatgggagtaaaaacaagcatagcagtttttgttttgccacttaacccagcaaaatggcgctaagaagacaccgtgtagcgattacttcacgatgcagatcttgatcacggatgcgacgccaatacggtgcagagcaacaacagcatcaccaggcttgcacaactgcttctgtacagctgacttgagag

SEQ ID NO: 41115 - DNA, 498 bp, Oryza sativa
  Clone ID: uC-osroM202034g02b1
ctctctctctctctctctgtctctctctcgtcgtctgcaagcttccgcctcccggatcgcggcgaccaccggaggaggagggagcagccatggcgaacatcgacatggggaagatcctggcggggctggagaacgacgacgcgcgggtgcccaagaccaagctggtctgcacgctcggtccggcctcccgctccgtccccatgctcgagaagctgctccgcgccgggatgaacgtcgcgcgcttcaacttctgccacggcacccacgagtaccaccaggagaccctcgacaacctccgccaggccatgcacaacaccggcgtcctctgcgccgtcatgctcgataccaagggtcctgagattcgtactggatttttgaaggatggcaagccaatcaagctaacaaagggtcaagaactcactgttaccaccgattatgagatcaaaggtgatgagaacatgattaccatgagttacaagaaactgccagttgatgtga

SEQ ID NO: 41116 - DNA, 373 bp, Oryza sativa
  Clone ID: uC-osroM202034g04b1
ttgttttgcggctccgtggtggcatgcagatctttgccaagacactgaccgggaggaccatcaccctgaaggtggaatgttgtgacaccatcatcaacgtcaaggtcaagatccaggtcaaggaggtcattaactacagaccagcagaagcattatctttgccgccaggcagcttaggggactgtaggacccttgctgactacaacatccaggacgagtgaaccgcttaccttgtgctacgaatcacgggaggtatgcaaatgttggagaagactctgaccatgaagaccatcaccctagaggtggagtcttctgataccatcgacaatgtcaaggccaagatccaggacaaggagggaattccgccggacca

SEQ ID NO: 41117 - DNA, 343 bp, Oryza sativa
  Clone ID: uC-osroM202034g05a1
gggatacaaaaagacagggcgatattgataaatcaccacttgcttacaggaattacaatgttctgtagctatctaagctactttgacaaatggctaaatgaggatacatttaatcgtaaccgtgaagttaacatggtcaaacaagataatcttattgtaatttagaatgcgggctattttcttaatctttcatctggttaatctctattggatcaactactctgaaccttgttcccgctgaagataccgttgagtgttgtagaaagcttcacgcccccttgagcgcaactcttttgtacaacacgcgcgggaacgaaaaaatagtcatcttttaagggggatt

SEQ ID NO: 41118 - DNA, 465 bp, Oryza sativa
  Clone ID: uC-osroM202034g05b1
agttgcttagcaaccatggccgcgcgcgtgctccccctcctcctcgtcgtcgtcgtcgccgcggccatggcgagagcccccacggcccacgcgtggggcaaggagggccactacatggtgtgcaagatcgccgagggtttcctgacgaaggaggcggcgacggcggtgaaggagctcctccccgggtgggccggcggcgagctcgcggaaacgtgctcgtgggcggacaccgagcggttccggtaccggtggtcgagccccctccacttcgccgacacccccggcgactgccagttcaactacgcccgggattgccacaacacatacggtgagaaggacatgtgtgtggtcggagcgatcaacaactacaccaacgcgctcgaggactcatcaagtccatatgatccaaccgagagcttgatgttctttgcacactttgtcggcgacgttaccagccttttcact

SEQ ID NO: 41119 - DNA, 399 bp, Oryza sativa
  Clone ID: uC-osroM202034g06a1
gaaaaaacagcaattgtaaagaacattccaaacattttcagggcgcacaaagcccaattggggggggacgatcaacttttctttttaggaacaattaagcttttctaccacctgtcacgaataaaatttttgaattcctaacacgaccccaatcaaaacacatccccactagtacggggaatgtcactctttgaacattgaacaaagttagtttttgggcaaccttttttaaagttttctaaaaatcatcctttttctctttgttttttggtactttttgggggtgcaccaaaagaggcagccttttaaacttgatctgaactatccaagggcaaaagcattatttatttctttgccatggaacttttgggccgagttgccatttagaaccggaaatca

SEQ ID NO: 41120 - DNA, 408 bp, Oryza sativa
  Clone ID: uC-osroM202034g07a1
aacagccaggcagatttactgtcagatttttccttaattttatactagtataatttaacaggttctgctacatttgcctttttctgtatcacgtactccttcctactagatagagaaacgccaattcagttctttacatcattcaagcacaaaaatctggcttgaatctacatgcaaagaaaacaacataatgccactatagtatatggaatctcatcagcacaacatcctcacctcccaatataaaaccctatctggaaccatccaagaggctcctcagaatgtatatgcatctccttcactttccataaaaatcatcacaagaaatggaaatactcgatgcattttgactgaccgatcggcagcaatgtccttgacagagcaccagtggtactgggtgaagcactt

SEQ ID NO: 41121 - DNA, 456 bp, Oryza sativa
  Clone ID: uC-osroM202034g08a1
gggggcataaatattcatctttttattatgtaaattatgctgcttttacaaaattttctttcagaaaagaagaaaaataaactacccacaaagtagtaacatttacaactactggagctaacagagaattcatcattgaaaaatagaccccaaattgcagggtttagttcgattgtccactcgtggactacaacatgagtctccgtttgtcgacaaaccccctcaactattggccttcaatttctccccgaggattttgttcaacaaaacaggattagctttaccctttgatgctttcatcacctggccagcaaaaaaatccttgcaatttagttttcccggaccgatactgctcaagttgctttggattatcagctaatacttgatctaccattgcctcaattgctgcaggatctgctatttgaaccaaatctttttccttatcacagacttgac

SEQ ID NO: 41122 - DNA, 389 bp, Oryza sativa
  Clone ID: uC-osroM202034g08b1
tctctcttttattcactgtttccgccgccgccgccgccgccgtcgccgcccgccgcgccggcgttctccccccgccgacgaagcacggcgtggagtgtagacgcagcctcctcgctctctctcacgccggcgagcagggtctggagccaggagcgacgcggcggccggggccggggcctccatctcggttcgaaccgcactgaaggtccctccctgcattagggcgcacaatggcactgacccttctcagagggatgcgaacgccggttgtagctagaaggaatgctggcttgttcttcaccacattgcagtctccgttgttgtcccgcttcacgatgagagcggagagcgcgcgggccgcagcgcccaagtcgattcagctggcgacc

SEQ ID NO: 41123 - DNA, 54 bp, Oryza sativa
  Clone ID: uC-osroM202034g09a1
gtggtgttgtttttggggggatgaggagggagcggggtatcacatgaacacgct

SEQ ID NO: 41124 - DNA, 363 bp, Oryza sativa
  Clone ID: uC-osroM202034g09b1
tttgtatgcgagcggccggccctattattttggtgggggaagtttagcatgtttatcgcgaagctaccgccagcggtataaccattacacactgcttgctgggcaccgtcccatggccgaacgtgaaaaacatcgcccaagagagctggacaatttacagcaggcggggcagatgtccctcaattatacacctaccgacttatcggcacagcacaaggactaggcttttggtcatgctaaggaatggaaattttgcagagcctagcacctgaagcctttatgcgcttctgaggaaatcagctcacgttttctgacggggcatgggtaccacaagggttcttggctggttgtgcaagagaaacc

SEQ ID NO: 41125 - DNA, 403 bp, Oryza sativa
  Clone ID: uC-osroM202034g10a1
gaagaacaatttttccctgcttcctttttcccaagtccaggaagaatgaattgaacaacaagattaacctaaggctagaatgaaatcgcccaaatcgcagcatcgatgcgtagtcatgatcatacacattgaccagtactgatctaacaacaaccatgatcagctggtgctcgaggtccacgaaaggaaccatcttttttgctcggcaataatggccgtcatttcgcgccgacgccgagcgtgagctcgagctcctcggcggcgacctcggggatcctctcgccctcccatggcgtcaccctccccttgtcgaacttgaactccgcgccgtctcggccggcccgcccttctatttccatggagttggaggtggaggccccccggttgccaaggttgtaggtgg

SEQ ID NO: 41126 - DNA, 450 bp, Oryza sativa
  Clone ID: uC-osroM202034g10b1
ggtgcggcggccgcggcggcggcggcggggaggacgccgacgtggaaggagagggagaacaacaagaggcgggagcggcggcggcgtgccatcgccgccaagatcttcacggggctccgggcgctcgggaactacaacctccccaagcactgcgacaacaacgaggtgctcaaggcgctctgccgcgaggccggctgggttgtcgaggacgacggcaccacctaccgcaagggatgtaagccgccgccatcgtcggctgggggagcgtcggtggggatgagcccctgctcgtcaacgcagctgctgagcgcgccgtcgtcgtcgttcccgagcccggtgccgtcgtaccacgcgagcccggcgtcgttgagctttccgagccccagccggatcgacaacccgagcgccttctgccttcttccgttccttcgggggcttcccaaccttccg

SEQ ID NO: 41127 - DNA, 298 bp, Oryza sativa
  Clone ID: uC-osroM202034g11a1
gtggtgtcttgttgaacatacagggtgaaattaattgattaatctttccgtgtgataatggtaacaagggacgctctttgacagtgaaaggtacagcaattaagatcaatttggccaaacaagaaacacacgtacattaagattgaagactgactaggcaaaacaaaacaaactaataaaaggcatctactgtacacggggatgaacacaagaagaagaatatagggcgtgacggagacatggaccaccattttcgggagcgggttatggttggagcttattgttggaaacctggttg

SEQ ID NO: 41128 - DNA, 489 bp, Oryza sativa
  Clone ID: uC-osroM202034g11b1
tttgttcgatcgattgcttctccctcctctcgctactagactagagagtaggtagagctagctttctagctcgtggatcgttaagtttgtagtcctgcccgggcgccggcggtgaggtcgcgatggccggcggcgcggtggtgagcacgggggcaggcaaggactaccctggcaagctcaccctcttcgtcttcttcacatgcgtcgtcgccgccaccggtggtctcatcttcggatatgacatcggtatatcaggtggtgtgacgtccatggacccgttcctgaggaagttcttcccggaggtgtatcggaagaagcagatggcggacaagaacaaccagtactgcaagtacgacaaccagctgctgcagaccttcacctcgtcgctctacctcgccgccctcgtctcctccttcttcgccgccaccgtcacccgcgtgctcggccgcaagtggtccatgttcgccggcggcctcaccttcctcatcg

SEQ ID NO: 41129 - DNA, 439 bp, Oryza sativa
  Clone ID: uC-osroM202034g12a1
gtggtgtcttgctgtacatacagggtgaaattaattgattaatctttccgtgtgataatggtaacaagggacgctctttgacagtgaaaggtacagcaattaagatcaatttggccaaacaagaaacacacgtacattaagattgaagactgactaggcaaaacaaaacaaactaataaaaggcatttactgtacacggggatgaacacaagaagaagaatatagggcgtgacggagacatggactacgatattcgtgagcggattatggttggagcttattgttggagacgtggttggcgccgacgtggacgtcgtggtctccgatgaatcggcgccagaaccagtgggactttcaaacgagcaccatctcctcgatggggacgttcttggtctccgggaggaagagggcgataaaaactgacatgatgaccacccca

SEQ ID NO: 41130 - DNA, 324 bp, Oryza sativa
  Clone ID: uC-osroM202034h01a1
gggagaggtgtactttttagttgagcacccaaactattctctttatattttatgaacatatgcagcaacaagttcactctgcaaattatcactgtctgtgggataggaccgccaaacagcctaaatgtcgggaataaagagcattcttgcacagatgggccaacacaatggtgccactgtaacaaacacctatttgtttaatgactaattaacgaccagaatctaaattgctaaagttttaaggctaactggggccggcagaggctgacgaattggtgaggcggcccgtattgagagggacaccctcgtggttgacttgtagcc

SEQ ID NO: 41131 - DNA, 264 bp, Oryza sativa
  Clone ID: uC-osroM202034h01b1
gtttgttttgtctgcccgtcgccgtcgacgccggctgccagatcttggcatggcgtcggagaagaagcaggcgaacccgatgcgggagatcaaggtgcagaagctcgtccttaacatactcgtgatcgagagccgatatcgcctcacccgcgcctccaaggtgctggagcagctgaatgggcagtcaccggtgttcttcaatgcgaggtacactgtgaggtcggtcggcactcgtcgtaaagagaagatcgcgtgctacttgac

SEQ ID NO: 41132 - DNA, 110 bp, Oryza sativa
  Clone ID: uC-osroM202034h02a1
aagagaaaataggacgataactctgtacattccaattatacattatcattatatatttatactagttcaatgtatctcactcttgttacaattattaattaaagtttact

SEQ ID NO: 41133 - DNA, 96 bp, Oryza sativa
  Clone ID: uC-osroM202034h03a1
atgggggcttttttaattcttatgggggtttacaccaattttttttatgacctgctttacctacgcctccttattgaggactcaggattttacttc

SEQ ID NO: 41134 - DNA, 430 bp, Oryza sativa
  Clone ID: uC-osroM202034h05a1
acgcgaaacacatcatttttatgataattaacatatattcgtccatataatcaaagtacgggaatatcatatttcatctacaatctcatacagagtctactaaatatatttcttctctttgaacatggtttgacaaaccatttttatttgttgggcctgttaggtaagctggttgcagtggctgcggctgcgctgcagcacatgcagccgaacaggcccgttgttaataactaatattatttttacttttagctcgattattaaaaaatattaaaagttagttaggaatttccacagcaaagcgtggggaatcaccccagcaaagcgcgggaatcacccagtatggcacaaaattatccacaaccatcgatgccaccctttgagccacagccactggcgcggaggcgccgctaggaagaaactgggggag

SEQ ID NO: 41135 - DNA, 511 bp, Oryza sativa
  Clone ID: uC-osroM202034h05b1
atttagtcgaagtcttgtattaagaatttaagattaattttgatgaacatcggcattaattttaatgccactttactggaatgattaaactgatgatactgttagtcttctgttgagcagccaatatttgaaaaggaaactcctatactgcctttgtaagcagatattggcttttgagatgtagtcctttctggggatgattcaacacctcttgttgtgatgactggattaactagtgattttactgcttctatcccctggttgaaacttggatcccttcacgagagtggaaatgggagaagtggagtcaagcctaaatcaatgatggagcatgtggaaattagcaaaccctcaaatacagaatcttgcaccaggaaaaaagatgtcacagaattgcatgtttggtagcaattgctgaaacatgttcaactggtgcttgttcctcaaactatttatccttgcagtatgattgtttctactgtgctggatggacagaagatatccatgtggg

SEQ ID NO: 41136 - DNA, 433 bp, Oryza sativa
  Clone ID: uC-osroM202034h06a1
acgcggaacacatcatttttatgataattaacatatattcgtccatataatcaaagtacgggaatatcatatttcatctacaatctcatacagagtctactaaatatatttcttctctttgaacatggtttgacaaaccatttttatttgttgggcctgttaggtaagctggttgcagtggctgcggctgcgctgcagcacatgcagccgaacaggcccgttgttaataactaatattatttttacttttagctcgattattaaaaaatattaaaagttagttaggaatttccacagcaaagcgtggggaatcacccacagcaaagcgcgggaatcacccagtatgacacaaaatcatccacacccatcgatgccacctctgagccacagccactggcgcggtggcgccgttaggaagaaactgggggagagg

SEQ ID NO: 41137 - DNA, 552 bp, Oryza sativa
  Clone ID: uC-osroM202034h06b1
atttagtcgaagtcttgtattaagaatttaagattaattttgatgaacatcggcattaattttaatgccactttactggaatgattaaactgatgatactgttagtcttctgttgagcagccaatatttgaaaaggaaactcctatactgcctttgtaagcagatattggcttttgagatgtagtcctttctggggatgattcaacacctcttgttgtgatgactggattaactagtgattttactgcttctatcccctggttgaaacttggatcccttcacgagagtggaaatgggagaagtggagttaagcctaaatcaatgatggagcatgtggaaattagcaaaccctcaaatacagaatcttgcaccaggaaaaaagatgtcacagaattgcatgtttggtagcaattgctgaaacatgttcaactggtgcttgttcctcaaactatttatccttgcagtatgattgtttctactgtgctggatggacagaagatatccatgtggttttccaattaccttcattagaagtatccacaggctcctttg

SEQ ID NO: 41138 - DNA, 404 bp, Oryza sativa
  Clone ID: uC-osroM202034h09a1
gatgaacaagggttccctgcttcctttttcccaagtccaggaagaatgaattgaacaacaagattaacctaaggctagaatgaaatcgcccaaatcgcagcatcgatgcgtagtcatgatcatacacattgaccagtactgatctaacaacaaccatgatcagctggtgctcgaggtccacgaaaggaaccatcttttttgctcggcaataatggccgtcatttcgcgccgacgccgagcgtgagctcgagctccttggcggcgaccttgtggatccttttgcccttccatggggtcacccttcccttgtcgaacttgaacttcccgccgttttgggcggccgtcccttttatttccatggagttggaggtggaggcccccgggttgacaaggttttaggtggg

SEQ ID NO: 41139 - DNA, 288 bp, Oryza sativa
  Clone ID: uC-osroM202034h09b1
tttggtgctgcggccgcggcggcggcggcggggaggactcctatgtggaaggagagggagaacaacaagaggcgggagcggcggcggcgtgccatcgccgccaagatcttcacggggctccgggcgctcgggaactacaacctccccaagcactgtgacaacaacgaggtgctcaaggcgctctgtcgcgaggccggctgggttgtcgaggacgacggtaccacctaccgcaagggatgtaagccgccgccatcgtcggcttggggagcgaccggggggatgagcccc

SEQ ID NO: 41140 - DNA, 342 bp, Oryza sativa
  Clone ID: uC-osroM202034h10a1
gaaaaaaacaggggtttaagtaaaaaaaaaggtggtcatttccccgttcaaaaaatttaaccgtcaaaagaaatcccttacccaaatttaaagggaaatttaaccggtgtgtttggcaacattgtaaagggtttcccccaactaaaggtccaaaacaacagtggcaattacaattagaagccctaagatcaatacaccactgtgggcaacagggtacatccacgactccccgtccatgaaatatatacctcctactgctaagagagaacaacaggggttgtaaagctccacgatctgaatggagatgctttaaatggatgggagaagttacagtcatactcc

SEQ ID NO: 41141 - DNA, 452 bp, Oryza sativa
  Clone ID: uC-osroM202034h12a1
gacttgaattgtaattttgcacaagggcaagcccgagttaaaaagaaccaatgaacactttatccacgacccatagcaatcctgaaagataccgacacgatccgaagcaacctaatcgattacacatttacagggtggatactgaagactaagaacagctctctcatctcatccacagaagacaagagagggggggtcgggctggcttattgctcaggtacaaatctctttttacagaagtttccctcatttagggaatgaggaattgaggatcgaagtcctgggatatccagactcaattctcagaatcctcgggtatcttgaaaaggaactggggcaactaggcgatgcggggaagatttatcagcagatctccgaaggagtccttcctttgacatggctggtggctgagcgggacctgtagcttttactgtggatgcagccgagctaaa

SEQ ID NO: 41142 - DNA, 123 bp, Oryza sativa
  Clone ID: uC-osroM202034h12b1
tgttctcgatttcgcttcgcttcgcctcgcgttcgccttctgcttcgatttcgacttcgattcggccggcggcggcggcggcggcgtcggtttggggggagttagggttagggttagggttag

SEQ ID NO: 41143 - DNA, 473 bp, Oryza sativa
  Clone ID: uC-osroM202035a01b1
ataaaacgtggcccattaggcccatcccatgctatatcagttacacataagtttatacaatttggaatgatttcattttccttttccagcccacatcatctatctcaggctctcaggctctcagctacgatgaatccaaacatcaggttccaaaccaagtcaccttagtttaaaccatcatcaaatttaaataatgtttacaggttgcctgacgttatagcgtacattaatttgaatttgatggtatatacttcaaaaccccaaaagaaaaggaaagaaaaaaacaagaaagaaactaagaaaaacaagtcaaacaaccgagcctgcaagaaccaccatcatcctcgtcgccatcgccggcggcggcgatctcacgacgactcggcgtcggcggtggcggtggccacggccttcaccttgggcacctcgacggggaagctgtcgatctcccccgcccacgggttgcgctcgtc

SEQ ID NO: 41144 - DNA, 399 bp, Oryza sativa
  Clone ID: uC-osroM202035a02a1
ttttcgcgccgtgctcgacaccatcggggagaacctaggcctcggggcctggcacatggagccgtcgcggatgacgctctaccggtggggcaacacgtcgagcagctcgctctggtacgagctcgcgtacgccgaggccaagggccgcgtccgccgcggacagacggcgtggcagatcgcgttcggctccgggttcaagtgcaacagcgccgtgtggagggcgctccgcaccgtcgagcccgacgccgacgagcgcaacccgtgggcgggggagatcgacagcttccccgtcgaggtgcccaaggtggaggcccgcgccaccgtcaccggcgacgccgcgtcgtcgtgagatcgccttcgccggcgatggcgacgaggatgatgggggatcttgcaggc

SEQ ID NO: 41145 - DNA, 474 bp, Oryza sativa
  Clone ID: uC-osroM202035a02b1
tttttgtataaaacgtggcccattaggcccatcccatgctatatcagttacacataagtttatacaatttggaatgatttcattttccttttccagcccacatcatctatctcaggctctcaggctctcagctacgatgaatccaaacatcaggttccaaaccaagtcaccttagtttaaaccatcatcaaatttaaataatgtttacaggttgcctgacgttatagcgtacattaatttgaatttgatggtatatacttcaaaaccccaaaagaaaaggaaagaaaaaaacaagaaagaaactaagaaaaacaagtcaaacaaccgagcctgcaagaaccaccatcatcctcgtcgccatcgccggcggcggcgatctcacgacgactcggcgtctgcggtggcggtggccactgccttcaccttgggcaccttgacggggaagctgtcgatctcccccgcccacggttgcgc

SEQ ID NO: 41146 - DNA, 388 bp, Oryza sativa
  Clone ID: uC-osroM202035a03a1
gtgggcctcatcctttttattcattcctcccagagagacggatccatggaagttttcttgccctcatcaggcaagcagagcacacacacacggtggcagtggaagtgctatgaacaagacgctaatcaacatccagagctaaaacaaacaaggggatcaaaccaaatcccgaaaaaaaaaacacaggggaaagtccacatcttcttcttgtccccaacgcctccgtgtcaccaccacgtcttgcggatttttttttaccctgttctattcgctcaggcgtccacgatctcgccgtcgtccttcgacgccaggatcagcttcgggtgcgccgtcgccgactgcgccttattgatcgggccgttaatggcgtttggtcggccgagcgcct

SEQ ID NO: 41147 - DNA, 479 bp, Oryza sativa
  Clone ID: uC-osroM202035a03b1
tccattcaagaagctcagctcctcctcctctcgcatggcagccatggccaccaccgcgtccagcctcctcaagacctccttcgccggcgtgcgcctccccgccgccgcccgcaaccccaccgtctccgtcgcgccgcgcaccggcggcgccatctgcaactccatctcgtcgtcgtcgtccactcccccctacgacctcaacgccatcaggttcagccccatcaaggagtccatcgtgtcccgcgagatgacccggcggtacatgaccgacatgatcacctacgccgacaccgacgtcgtcgtcgtcggcgccggctccgcggggctctcctgcgcgtacgagctctccaaggacccctccgtcagcgtcgccgtcatcgagcagtcggtgtcccccggtggcggcgcgtggctcggcgggcagctgttctccgccatggtggtgcgcaagccggcgcaccctgttcctcgacgagctc

SEQ ID NO: 41148 - DNA, 282 bp, Oryza sativa
  Clone ID: uC-osroM202035a04a1
gggaggaaactgacgttgaaactgaacaagtttttgtttttgcataacagaaacttgtttgcaaaattacacccatcatttgaaaaagtagccatgcataaccaaaattacacaccggggtctctagttttgaaatggtatcggttctttccctggccacgtttcaattttctctaagtacttgacaggaacaacgccatccaaaaacccagaatcacctttttagctattagaacttggagcgcttgttgacatccaaacattacatctcccgcatgccga

SEQ ID NO: 41149 - DNA, 464 bp, Oryza sativa
  Clone ID: uC-osroM202035a05a1
aaggagggataacggattcattgtaataggaccatccaaggaggtttgaggttctcatcccacagacacagattctcgataacaccatatcaaaactcaaaacttgagagtactttaagtgaacctaaaagacacaacataagatagtcttgcaaagcataggcggactggctaacatctgtggactgcttagtcgaacaagctgaaacccatgtcatcgtcgctctcctccttcgcctcctccttcttctcctcggcagctggggcagcagcagtaccaccgtcagcagtaggggcagcagcagcagcaactggagcagcaccaccaccagatccgactgagaggatgaggtcatcgacgctgcggtgctcgaggagcttggcgaaaagaccgggccagtaggccttgaccttgatgttggccgccttcacccagggggcgatcttttcaaaggtgatgggga

SEQ ID NO: 41150 - DNA, 314 bp, Oryza sativa
  Clone ID: uC-osroM202035a06a1
ataggatcaaaacatttctattaccacaactttttaaggatggaatcgagtagcaatactttcaccccaaaatacagtttagcgacaatatcttagaaaagccgcttgctttgccgccatggctggcaagctgagcagagcagctaacacaaagaacacgagatcactataaaccaaacggcaacgaacgaagaaaatacagggtcttttttgtctgaagatacacgaagcgggtcgttttcttttatttttaggctcctcttcttctcgatgaagggtggatggcaaaggcaatggcgatgggatcttggctt

SEQ ID NO: 41151 - DNA, 404 bp, Oryza sativa
  unsure (1)..(404): unsure at all n locations
  Clone ID: uC-osroM202035a06b1
ttgttctacggctcttcttcagtatcgaatcctctcttctcctcgtgcccaccaccaccaccgtagcaatggcgggcaacgggccgatcaacaaggaggacccgctcaactggggcgcggcggcggccgagatggccggcagccacctcgacgaggtgaagcgcatggtggcgcagttccgcgagccgctggtcaagatccagggcgccaccctccgcgtcggccaggtggccgccgtcgcccaggccaaggacgccgccggcgtcgccgtcgagctcgacgaggaggcccgcccccgcgtcaaggccagcagcgagtggatcctcaactgcatcgcccacggcggcgacatctacggcgtcaccaccggctttggcggcaccttccaccgncgcaccaaggac

SEQ ID NO: 41152 - DNA, 356 bp, Oryza sativa
  Clone ID: uC-osroM202035a07a1
ggggacactgaaagaatacatctttgcctcagaaaaacggcaagagttacaagttttcacttttcagtcgcattgtacatttctaacacctcccctcagcaacaatgctatggctttaacaactctttgaccagtactctgtatcaaaatagcttaactagcttactccatctaaatgaacaggaaagcgtcaacaaaatggaggcccgggcactatatcatctgtacactgtttgattacctcacaacattcgcctaccaatgtcagtggtacgaggaaagcttacagcaaccgggtagctttttgagttaaaaaagacaaagattaacaccacaatggcatccctatgaagaac

SEQ ID NO: 41153 - DNA, 471 bp, Oryza sativa
  Clone ID: uC-osroM202035a08a1
gccgcgcccgcgccggagggtgccttcgacgccgcccggaagatgccgccgttcgactacacgccgccgccgtacgacgggccgcgggcggaggagatctcccggaagcgggccgagttcctcagcccctccctcttccacttctacgaccgccctttgaacatagtcgatgggaaaatgcagtacctgttcgacgaggatggccgtcgttacctggatgcttttggtggcattgcaaccgtttgttgcgggcactgccatccggatgttgttgaggcgatggtcaaccaagcaaagaggatacaacactccacagttctttacctgaatcatgctattgcagattttgccgaggcattggcagccaaaatgcctggtgatctgaaggttgtttttttcacaaattctgggacggaggcgaacgagcttgcactgatgattgcccggttttacactggttgcatgacatta

SEQ ID NO: 41154 - DNA, 449 bp, Oryza sativa
  Clone ID: uC-osroM202035a08b1
gcgaaatcactgacatttgccaatataattgtttcaacatttacatcgcctgggcattgtgattggttcgttttgtcgttcagcatgtaaacaataactataacaatacatctgacattgacatgcgcttattggtcacgagtcacaacacatctgattagagaccggaggagcgcctattggaccatgtgttgagcagcgcatggtgggtttgcaggacatattacgagacaacgaggtgctatctcaccaatccccaacattatttatggatacggatcacatgcggacaggttgatcctgccagtccctctccgactcacagcttcgatagtgaaatgtccatcgcctcaatgaagaaatcggagtcctctttggtgaagcatagtggaggtgttactttgaacacgttcccgtagaaaccacctttcccaaccagcacacccatg

SEQ ID NO: 41155 - DNA, 187 bp, Oryza sativa
  Clone ID: uC-osroM202035a09a1
tttttattggttttttttaattttttggggtttttttttttttttttaaacaccaggaacctggttttatttctggcaagcacctgcccaaaatatccaaaaagttcttaaaccctttaaaaaaatcaaacccctggtaaacattgatcccaaaacactccttcctaaatttattaaattcctaatt

SEQ ID NO: 41156 - DNA, 130 bp, Oryza sativa
  Clone ID: uC-osroM202035a10a1
acttaaaaagacaatttcctttatatttccggaggcaatttacccaatcatgcctattctacactttcatagctattggttcctgacaaataaacaaaaccaagctttttgacaacctctattccacctt

SEQ ID NO: 41157 - DNA, 442 bp, Oryza sativa
  Clone ID: uC-osroM202035a10b1
tcggtatcgactacaatgcgccgctgtttgcggggaagggccttgaggaggcctacaagttcatgccggatgtcatccaggctatctccgatggcatcgagcaattgattgctgagggcgcaagggagctgattgtacccggtgtgatgcccactggatgcttccctgtctacttgaacatgctcgatgagccggccgatgggtatggcccccagagcggctgcgtccgtcggtacaacacattctcatgggtgcacaatgcacatctcaagcgcatgcttgagaagctccggcccaagcaccccaatgtgaggatcatatatggcgattactacacgcctgttatccagttcatgcttcagcccgagaagtttggattttacaagcagctacctagggcatgctgcggggctcctgggttcggtgcgaagccgcttacaac

SEQ ID NO: 41158 - DNA, 308 bp, Oryza sativa
  Clone ID: uC-osroM202035a11a1
gggtgcaaaaagacagtgcggtgttgataaatcaccacttgcttacaggaattacaatgttctgtagctatctaagctactttgacaaatggctaaatgaggatacatctaatcgtaaccgggaagttaacatggtcaaacaagataatcttattgtaattcagaatgcgggctattttcttaatctttcatttggttaatctctattggatcaactactctgaaccttgttcccgctgaagaaccggttgagtattgcagcaagcctcacgccaccttgagcaatccttttctgaacaacaggcagg

SEQ ID NO: 41159 - DNA, 451 bp, Oryza sativa
  Clone ID: uC-osroM202035a11b1
tttgttgcaaccatggccgcgcgcgtgctccccctcctcctcgtcgtcgtcgacgccgcggccatggcgagagcccccacggcccacgcgtggggcaaggagggccactacatggtgtgcaagatcgccgagggtttcctgacgaaggaggcggcgacggcggtgaatgagctcctccccgggtgggccggcggcgagctcgcggaaacgtgctcgtgggcggacaccgagcggttccggtaccggtggtcgagccccctccacttcgccgacacccccggcgactgccagttcaactacgcccgggattgccacaacacaaacggtgagaaggacatgtgtgtggtcggagcgatcaacaactacacccacgcgctcgaggactcatcaagtccatatgatccaaccgagagcttgatgttctttgcacacttcgtcggcgacgttcacc

SEQ ID NO: 41160 - DNA, 110 bp, Oryza sativa
  Clone ID: uC-osroM202035a12a1
ggggcattaagacaaagcgggctttataaaacaccacttgctgacaggaatcacactgataataagcgctttcacctactcacacaaaaccttatttgagtaaacatata

SEQ ID NO: 41161 - DNA, 551 bp, Oryza sativa
  Clone ID: uC-osroM202035b01a1
gccacgccgccaccaactcctccccccaaatccgccatggaagacggccacgctcccgccggagccgagctcgcggtggccctcgacgaggaggaggaggaggccgccccgctggtatccggcagacgcggcgccgcggcggcggcgagggcggcgacgtcccagacccgcgacctgcacctgctgagctcggccttcctcttcgtcttcctcgcctaccacgccgcccagaacctgcagagcaccgtcaacacggacgagaacctggggtcggtgtcgctggggctcctgtacacgtcgttcacggcgttctcggtggtgggctcgccggtggtgcggcggatggggtccaggcgcgcgctcgtgctcggcacctccggctacctcctcttcatcgccgccaacctcgtcccctcctggtacacaatggtgccagcctccctgtatctgggttttactgcatcgatcatttgggttgggcagggaacatatttaacgtttgttgccctcagtaatgcaagagacaataatttgcctgaaggccaaacttt

SEQ ID NO: 41162 - DNA, 484 bp, Oryza sativa
  Clone ID: uC-osroM202035b01b1
cagaacaaaagagcagctattataaacatatatatttgactgatgttacatttggtagaaacaaccacggaacagaaacaactggaggaaaacagattttgctacaaggccgtcactctaattttgaatgcaatcacttcaattcagcaaaaatcgctgaaacaaatggagtcagggtggtgttgtgttgcacatcaactgacagatacctcatttccttttggtttcgtatcgctcgtgcatacagtatgtgctgctttggttgttggtaacactgatcaagatatgtggtgaaattggccccactttggaattggtttctgttggacaaaaggatttcggatttcctcacgatctgacggtcgatggcttctccacaacaagtgtaagtaacaagaatgcgcccgaagagatgatgagcgcagtggccatcaagataagcatggcttgtagcgtaatatttgggctcaggaagaagatgact

SEQ ID NO: 41163 - DNA, 52 bp, Oryza sativa
  Clone ID: uC-osroM202035b02a1
tcggtcacgcggggaataattcgtccgggctgaataccacatggaagacggg

SEQ ID NO: 41164 - DNA, 512 bp, Oryza sativa
  Clone ID: uC-osroM202035b03a1
gagaggaaactgacgttgaaactgaacaagtttttgtttttgcataacagaaacttgtttgcaaaattacacccatcatttgaaaaagtagccatgcataaccaaaattacacaccgtggtctttagttttgaaagggtatcggttctctccctggccacgtttcaatcttttttaagtacttgacaggaacaacgccattcaaaaacccagaatcacctttttagctatcagaacttgcagcgcttgttgacatccaaacattacatcttccgcatgccgaagcttcaaaacccaatgaacttgacaatcacttcagcgtaaacaccatcgccctgagcactgtacaggctgggaataggatttttttccctaatttgcagatcttcatatagattgtccatcttgaattccttaaatatcgggttgagatattttgggaaaatgtgaccaatgagcgcgagtaccttcatgcgcgtgaactttataccagaaaagcccgggaaattggaa

SEQ ID NO: 41165 - DNA, 499 bp, Oryza sativa
  unsure (1)..(499): unsure at all n locations
  Clone ID: uC-osroM202035b03b1
atatatggcaaattacttccttttcaaaatctaggataccgttgacttttcgtactaacatttgacgttcgtcttattcaaaaatttaatataaatatgtaattgtataagctaagattatattgtagaaatttaatataattaaatgatataaggcaaatggtcaaacattatgctaaaaatcaatgacgtcatacattttgaaatggagggagtacttgatttttgttcttgtgagatgaggttgcaagtctcctctgtaatgatgtataaacttgcctggccaaaaataataataataataataatctggcccaactgttgttaggtttattttgtgacagaaaatttcgtggtagtaaaaattccagaaagtaatagtagtatatatagtagtaaataataacaaagaaggattttttttgtccatgtggagcatactgtgcccatggatctatttagttggngatgtgggccgaataagctgtttcgtgggcct

SEQ ID NO: 41166 - DNA, 419 bp, Oryza sativa
  Clone ID: uC-osroM202035b04a1
gggctcaaaatgtactaatgcattattaacatcccggccttagacagaaaacttcaatcacacagcccaatattacaaaccaccaagaacaagaataatgtaaagaacaaactagtcaaaatcaaataaatttaaacatggagagaggaagaatgaaagaaaaggaaaaaaaggaaaaaaaaagaaaagaaaagaaatgcatgcacatggctagcttcctcgaccattgtgtccgtacaccgttttacaagaggcagccaacaacggcggcgagcccggcgacgccccagccgacggtcctggcgctggcggcgcccgagggctcggtgtcctccgcgccggcggggccggaggcggccttcggggagccaccctttttgggcttggcgggccacccggtgggcgcggtggcgggggcc

SEQ ID NO: 41167 - DNA, 377 bp, Oryza sativa
  Clone ID: uC-osroM202035b05a1
aatcaggtgtaccagattaagtagacgcattggaagcaaagctacattccacaagtagcttcaataaattaatatctacagaacaaaaagtataaaatgtatagtagcatcaaatacagagtacaggatggttaaagttctcttgttacgggcgctgcttcaacatgtactttgggcacatatatacagaattttgaagtgaaattcccatgacgacagtcttttaactcctgattagctcaagctgctttcttgcttttgaatttgtttgcgcagatgacatatatcacaaagttcagaaaactgagcccagcaagaagcccgaagaaataatctaggggaccttgatttaagttattaggaatccatccaggatt

SEQ ID NO: 41168 - DNA, 402 bp, Oryza sativa
  Clone ID: uC-osroM202035b06a1
cacacgaagaagctgagacatgtattacaacattacactatatactagtccaatcacatctccaaattcactcccccatcccatggttgctcattgcagaagaaattaattgatgtgtagcctcgccgatgcgcaagcaccgggaggcaatatgcatagatcctacgtcgagaaggtcaggaactacacactgatgtggtcagatcaatggagctgtacatatgcagcttcttcttcttcttctgatggttctcggtcatgtccatgaggagaggaggaggttgacggcagccgccggccggccggcataagagcggccttcggtgcgccgactacgccatgaggatgaccatggcgaccactaacatgaaccgcatgctccccaggagaggggaagtccgc

SEQ ID NO: 41169 - DNA, 404 bp, Oryza sativa
  Clone ID: uC-osroM202035b07a1
ggggaagctctcagcacatcagcccaacaaggcctcacaactttgatcaaccggcgaatatacaagatgggaactaattcacactgcaacaggaaacctggtataaatctcttatcttacatacagacgtacccaagccagtcgcactactaataattaattagcctagagttatgatgttacgagccaatatatttggtgtcaaaatcctcaagatcatggccttgagactttttcagttttgccactagaacccacatgtttgcaagttcactttccaagaaggcttccttttgcttcgactcctcaattttcctttggagttctgcttccttttgttccttctccataagcacagcttctaatgccttttttttttcgaagcctggcgtgatgcttttttt

SEQ ID NO: 41170 - DNA, 339 bp, Oryza sativa
  Clone ID: uC-osroM202035b08a1
agggaaggaaacatttcatgggtcattgaaccatactaccaaagcatcagcatcaggtagttccaagttttaggatacaacttacaagaaagatacattcagcaaagtccacaggtgtcatattattgccgccatcatctcttacaaccagatttttttttcctctgaaatacaaaatggatttcaagggcacaaatgaagacaatgcaacttctgacgaagtgcaagcacaagaaaggtagataccttgaccatcacttttggtagccgcccccgacggcgtcgtagtcctcctccacggcggtgttcacgtaaggcacggggaagtccttggcgggg

SEQ ID NO: 41171 - DNA, 439 bp, Oryza sativa
  Clone ID: uC-osroM202035b10a1
ggaacaaacaactcaagatgtatatgtgttgcaacttgtcaagtgaacagctgaaatactgagttgccttacattatatgctacgaatataattaaaatgttcaccgcaaaagaatgtaattggaatatatccgtataaataacatcccatagtatgtgtaacaacgacccctcaaacaaatgactaaaataacgggtgtcacaaaagaagaaaaaaattcacaatttacgctgctgggctggcttcttcgcaggcaaaataaggcttcacagttccatcgtatcagcagctagcgccagcactgaagtagctaataaacagtggcataacttaaataaaaaaggtcttcatctacacaaaaagaagatcccatttttgcccccctcaggtatttacacaagggggggtagaccttgattgattgaagttcattttttt

SEQ ID NO: 41172 - DNA, 532 bp, Oryza sativa
  Clone ID: uC-osroM202035b10b1
tcggtgctgacaaatggtgcctatcttctcaatgtggattgtgatcactacttcaacagtagcaaagctcttagagaagcaatgtgcttcatgatggatcccgcactaggaaggaaaacttgttatgttcagttcccacaaagatttgatggcattgacttgcacgatcgatacgctaatcgcaacatagtcttctttgatattaacatgaaaggtttagatggcattcagggtccagtttatgtgggaacaggttgctgcttcaataggcaggccttgtatggctatgatcctgtactaactgaggctgatttggaacctaacattgttgttaagagctgctgtggtggcagaaagaaaaagagcaagagctacatggatagcaaaaaccgtatgatgaagagaacagagtcttcagcttctatctttacatggaagatatagaagagggcattgaaggttatgaagatgaaggtcagtgctgatgtccagaagagattagagaaacgttttggtcaatcgccaattttta

SEQ ID NO: 41173 - DNA, 378 bp, Oryza sativa
  Clone ID: uC-osroM202035b11a1
aggctgagaccaacatgattctctttgaatttttttttcctttttggagtagtgcctcacacagttaagaactgagatttgaatttaacataaacagaaaataacagttgattgtaggtgcctctccttctagcagtgcatttccattttcctccttgagaacacttttttctagtatttttgcaggttaggcggttaggccccttcgctgtacattgattctgaatggcctaaactttctgccattgcaccactgcaaaaaccagaagattgaccggtatcatttccattttcatttaagtttatgtgactaagtaaattttctaccttacatggcaacttatctaccccactttccaaaaaactgagcgccttttt

SEQ ID NO: 41174 - DNA, 436 bp, Oryza sativa
  Clone ID: uC-osroM202035b12b1
cgcccgtgccctaaaccgctcgccgccggcgacgttgcgcccccgaccgcgagtgggccggcggcgatgtccggccccgtcgttcccctcgcctcgacggctcaagggccctgcgagccctcccctggctctggcccgctccccgtttccgccgccgctagcgatccgccggcgccctcctcgtcggtgcccgccggcggtcgtgagccctccgctagcgggctgccccccgcggtgactcctcagcttggggatcatgatcaaggtggtttacctaactgtgtgccaaaagtggggatgacctttaattcagagaacgaagcttatgatttctacaactcctatgctagaaatgttgggtttagtatccggaagaaccacgcaaatactagggcggatgggagtctttgcttcaaatatttcctgtgcagcaatg

SEQ ID NO: 41175 - DNA, 414 bp, Oryza sativa
  Clone ID: uC-osroM202035c01a1
gtcggcgtcggcggagagagggagagggagagcgagtcttttgtgcgggtggttggggcgtgggcggtggcgtgttcaaggcggggagctacgtttcctgccggaggagatggggggttccaaggcggaggagaagcccgccggcggcggcggcggcggcgaggattggtggtgctaccagttcggcaacaaggacgcattgattgtgaagtcctctaagaaatcacccctcgcattgagaatggttgttttcgctatgactatgatctgcgggatatttatctgcacgatgtgtatgaagcaactaggaagtgatagcttgtctagaatagtgaagaacgaggttgcagaacagctatgcaataagtctgcaatcctgcattaaaagggtcactttgtgcattacccacaacc

SEQ ID NO: 41176 - DNA, 395 bp, Oryza sativa
  Clone ID: uC-osroM202035c01b1
gggagaagaataagcactgcaatacacaagattagaatcctgagcatatcagttccagaaaacataaaacaaaaaacaaaaccctgctatgacaattagtgaacctatcaaagaacactcgtgggcaaccggggcaatgcaccatcaaaattttcgccaggcacatcaaggccagctattttaaaaagaaatgtaaccagaaaaaggatatatctatacagggagtgtgaaggcacactgtcatattctgtagtcagcattcaagaagctctcatactgagtgccatttagagcattgtagacttcatcccaattttcaatttgctccgaaagtggtttggtgtgtattttcacgtgtcggctgactagtttgctccttggcactttgaggaaat

SEQ ID NO: 41177 - DNA, 334 bp, Oryza sativa
  Clone ID: uC-osroM202035c02a1
ggatcctgcaatatgcaaataccattacatggtagctttttttttacacgctgtcttaacagcttttgcatacataggacgacatagcggtatatgtacatatacggatgcacgtatgtacatacactgatgcaaaatgacccaaagaacgcaaatttaatttactagtaccatcatatctctctctagtcctactctgctgtagcggggggtaattattaaacgtaatacgtactatgaacacacaccaagccaagccccacgtaactcgcactggctgatcgattgaacaaaacttctactaatttatgctatatgcgaagggcgaggggtt

SEQ ID NO: 41178 - DNA, 447 bp, Oryza sativa
  Clone ID: uC-osroM202035c03a1
aaaggcaaaggaattagcaatgtatactcgcattccacaacagtcgaagggcaataataagtcttaacatccaagtttaaaccgaacagaaaatagagttttaaatgactgacatagtgcacaaagcgagcagatattaacggtcaatgcaacaactgaaatgaccgtcgacaaaacttaacgagtactaaaagagctagatatctcaaatgcagatatggaaagcaccacttgaacgaggctcatttctttttggcggcagccttggtcaccttggcaccggttgggtccttcttctccacgttcttgatgacgccaacagccaccgtttgcctcatgtcccgcacggcaaaacgaccaagaggagggtactcagagaaggtctccacaaccatgggcttggtgggaattatcttaaccataccagcatcaccgttcttgaggaac

SEQ ID NO: 41179 - DNA, 54 bp, Oryza sativa
  Clone ID: uC-osroM202035c04a1
aaaaaaagaatgattaattggactggaggatatttaaacaaaaagaattgacct

SEQ ID NO: 41180 - DNA, 343 bp, Oryza sativa
  Clone ID: uC-osroM202035c05a1
aatgagacagatcttcttaaaattaagtcatgcacgagtgatacattgatacatttggctgccaaaccagcattaggctgtgaagctgacaaattttcttccttgcaaattaccaagctacgggtaactaacaaaccttatgtgatcagtcagtcccccgattgcatgcaaactccggtcatcatccagaagaaaattcagctgcttcactgcctttagcttctcctcggcaacctagctccataatcttattgcattttgtgtgggtgtgtgtgtgtgtgtaaactaagggggaagtgtacatgcaattagctatagctaggttacgatcaagaacaattaa

SEQ ID NO: 41181 - DNA, 329 bp, Oryza sativa
  Clone ID: uC-osroM202035c06a1
gccgccgaggtggaggcgccgaaggaggagacgccggcggcgccggccgaggctgtggccgaggaggcggcgcccgccgaggccgaggtggcggagaccaaggaggcggagccagctgcggccgagccggcggcggaggaggtgaaggaggccgagcccgagccggccgagccggaggccgagcctgccaaggaggaggtggcgccagagcccgccgccgccgccgaggcggaggccaaggaggccgagccggcggcgcaggtggccgaggaggtgaaggaggaggaggcggcgccggtgccggtcgccgaggaggtgaaggtggagga

SEQ ID NO: 41182 - DNA, 370 bp, Oryza sativa
  Clone ID: uC-osroM202035c06b1
actctcagaaacgcacccattacacgatgaaaaccaatcaaacacgaaaaaaaaaaagcacaaaagaccgacaaacaacgcctgcgacgacggaggcatgtgggggccagagaggggcaccgcgtcactgacgctgggccccaccgccctcgatgacaaactcttttatttagccccacgtcacgcgtacccacacacacctacggagtcgagtactaccactccagctcactcaactcatcactcgctacacgcacacgtacgtacaactccggcgagtcgccggcggcggcggcgcgcgcgggccatgcatgtactccacggtgtacgacgacggcgagccagccttccccggcatgcactcactcgc

SEQ ID NO: 41183 - DNA, 391 bp, Oryza sativa
  Clone ID: uC-osroM202035c07a1
gggctcgacaaaacatggcatggctgattactgatactgatagtagatcgatccaccgatcaagagggaaaagaaaagaaaaacaaactttaaaagagatcccgaccttgtctttccaacccaaaatcctccaccaaaaaaattgaaagcaaaattagctacgaacaagaaagagtaacaataaacatcatccttatttctcctttaaacgatcaaatttaacttaattttaaggcactctcttcttcaacctttcctccttaccaggtaggtagtctgctttttttacctcagctgctgatctgcgagattttttttgttgttttccctctgtttcttccgctggtgagtgaatgaaggtaggtgtttgttgtgtcgcccaagactttgt

SEQ ID NO: 41184 - DNA, 127 bp, Oryza sativa
  Clone ID: uC-osroM202035c08a1
acttcaaaaaattccgattgggcaacaaaacaatgttatgcacacagtgccttctgtaagcaccggccttattgcgatatactatactgttagagaactcatcatcatcagttttacattggataaa

SEQ ID NO: 41185 - DNA, 319 bp, Oryza sativa
  Clone ID: uC-osroM202035c09a1
ggggaggagcaaactagcatggcagcaacttcattgccaaaactgcaaaaggcgcagattacaccatataggcaccagcgcgttcagcgagctcaatttcaagccggcactccaattcagaacttgcgaatatagctgcaaaaagcagacactagacaaccagtccgaccttggcaacggcatgccttttaagttcgataactccttgacacattactattatgatgatgtgactaagaaatccttgggcctgaatcccttccagcataggatgaggctggtccacgcccatcaattcctggatagctgctttcgaagt

SEQ ID NO: 41186 - DNA, 462 bp, Oryza sativa
  Clone ID: uC-osroM202035c09b1
tcggttaattggcaagtattttgaagagatcagccaagatactgggaaatatggatatggggttgatgacactcttaaagctcttgagatgggtgctgttgagactgtaatagtgtgggagaaccttgaaaccaacagatatgtgcttaagaacagagcatctggtgaaactgcgatcaaacattttaacaaagagcaggacgctgaccagagtaatttccgtgatccggctagtaatgctgagttggaagttcaggaaaaaatgtctcttctggaatggcttgctaatgaatacaagaagtttggttgctcgcttgagtttgtcactaataaatgtcacgagggatctcagcattgtagaggatacggtggcattggcggtatcttgcgttaccagctagatatgcggacatttgatgagctttatgacgatgagggattgtatgaagactctgcatagca

SEQ ID NO: 41187 - DNA, 400 bp, Oryza sativa
  Clone ID: uC-osroM202035c10a1
aggggtgaatagtgcaaaactgcacttattttgggacggagggagtataacgaatctggacagacagtatgtccagattcattgtacttggatatgttacatctattcaaaatcccttttgttataagacggagtgggagtagtcagatatttaaggagtttcttcttaagttttattcaagcccaaataccaagcaaggacatcaaagctttcccaaccagcagcaagatgctgatgatgagctgcaaccttccgcttttccgcaccctagggttcatgaaatctttagcttgaagggcgacgagcgccatgtaattggggattccagcagccgttgtgtcgagaatgccttccacgatcagggccgtgggggtatttttatttgaggcggaggagatg

SEQ ID NO: 41188 - DNA, 447 bp, Oryza sativa
  Clone ID: uC-osroM202035c10b1
ctaatctttggccacaggctaaaaagatggctttcgatctcaagctaaccgcatgcctcctcctcgccgtcttctccctcgccgccgccgccgactgcgagtgccagcccagcgacgaaggccacgacgcggccaagtcccggacgctcaaggtcatcgccatcttctgcatcctcgtgggcagctcagcggggtgcgccattccgtcgctcggccggaggttcccggcgctccgcccggacacgagcctcttcttcgccctcaaggcgttcgccgccggcgtcatcctcgccacggcgttcgtgcacatcctcccggtgtccttcgacaagctcggctcgccgtgcctcgtggacgggccgtggcggaagtacccgttcacggggctcgtcgccatgctcggcgccgggccacgcttctcctcgacaccgatcgccaacggctact

SEQ ID NO: 41189 - DNA, 580 bp, Oryza sativa
  Clone ID: uC-osroM202035c11a1
gcaggaggaggaggaggaggggaaggggagaccagggaggacgtgttcctccggaagctgaacgtctgctgcgtcgtgttcgacttctcctccgccgccgccgctgccgccgcagagcgcgggagggactcgccggagagggagaggaagcggcaggtgctcgtgtccctcgtcgactgcgtcggcgccgccgaggagcccctcaccgaggcgatgatctccggctgcgtccgcatgttcgccatcaacctcttcagggtgttcccgcccaaggtccggtccggcgccgccggggcggcggaggccgacgaagacgagcccttcttcgatccctcatggtaccacctgcaggccgtttatgagctgctcctccgcttcgtcatgtccccggtcgtcgacgtcaagattgctcgcaagtacatggacaattcttttgtgtctaggttgctcgacttgttcgattccgatgatccgagagaaagggaatgcttgaagacagtcttgcataggatataccggaaattcatgggcaacccgcctctttatccgcaaggcggggagcaataatctttataggttc

SEQ ID NO: 41190 - DNA, 394 bp, Oryza sativa
  Clone ID: uC-osroM202035c11b1
ccaagaaaatcaatctcagtatcctcagttgttcacagagcagtcgggtttaattggacattatcttctcaaacagagaaatgtccatcactagagagtacaccattaaagaatcacaagttcatcctcaaaccaataactattaattacagacttgagcacaaggggcttacaaatataacaaaatgccctgcacataacccatacaagctaacaatgaaatgaaccgaagtacattcgaaattccgaacgcatgtcatattatgtcatggtgggtgctaccaagggagcagatgcaggaagaacagagaaaccaatgtctccggtgactggacggaatgacgcgtttctctctaggttctcccatataagctttctccgctcctcagatgca

SEQ ID NO: 41191 - DNA, 385 bp, Oryza sativa
  Clone ID: uC-osroM202035c12a1
gtggggttcttttttttttttttttttttttttagaatcaacctctagcacgtttctttataaattaaaggctgggctgcccccccaaaaaggggataactctggggccctccttttaaagaaaaacttcaactattgaaccatttcgggggcacaaactggccaaaccatctggattccccccaccctggcaaaaaacaaagggttccaaggggacctaccaatcacttttttcccgggctctggtccataattggggggggtctcaaccctatctccgggctagtataaggtaacccatgcttttaagcacccggcccccgggtatacgggcggacactttcaagctagaccaacctcaccccccccaaacaatttcctttta

SEQ ID NO: 41192 - DNA, 456 bp, Oryza sativa
  Clone ID: uC-osroM202035d01a1
aaggaaatatatcatatattcgattatatatatatatataatagcagacaggttacatccattagaactcagaatcaccggaattgaacatcaaaagtacaacacaagcagcagcagcatcagccagcagcaaacgacatgattacccacgcttttggatgaagaacaagaagtacgagaagaagaagacgatggtcgaacaccttgatcgagctcaacaatggcgatcgatcaccaatcacctacttggtgaactcgatggcccaggcgttggcgtagatgtaggtggccttgaagccggtgaatccggcggcgcgggcgagctccctgaactccctctcgtacctctccttgccgccggggttgtgggcgagcatgatcatgtcgacgtggaacaccccctgctccctcgccgtcgcgtcggagctctccggcagcacgcacttcaccaccacc

SEQ ID NO: 41193 - DNA, 513 bp, Oryza sativa
  unsure (1)..(513): unsure at all n locations
  Clone ID: uC-osroM202035d01b1
gatcatcctcctcctccttcttctccatcgccggcgagagagagagagttagctagctaggatgggttctacagccgccgacatggccgcggcggccgacgaggaggcgtgcatgtacgcgctgcagctggcgtcgtcgtcgatcctgccgatgacgctcaagaacgccatcgagctgggcctgctcgagacgctgcagtccgccgccgtcgccggaggaggggggaaggcggcgctgctgacgccggcggaggtggccgacaagctgccgtccaaggcgaacccggcggcggccgacatggtggaccgcatgctccgcctgctcgcctcctacaacgtcgtcaggtgcgagatggaggagggcgccgacggcaagctctcccgccgctacgccgncgcgccggtgtgcaagtggctgacgcccaacgaggacggcgtctccatggccgcccttcgcctcatgaaccaggacaaggtcctcatggagagctggtactaccttaaggacgcagt

SEQ ID NO: 41194 - DNA, 488 bp, Oryza sativa
  Clone ID: uC-osroM202035d02a1
agattgaataatgttcagacttgttgcctttcaataaactggtgaaaattcaaacatcgtggttcaaaagaattacagtggtacaataaaaaaagaagggccctatcatccaaaagctccagaacagttaaacacaatctgaagcacaattgtttactcttgaaagaatttctagtggtcctaacccttggtgaaaaatgtaggatgtaaaatcaagttggtcagctacatccttggagagcctgactgctgtaccgcatcagcttgctcttgcaagactcgtcaatgctactgttgcgactcaaatctttagtgctattgacgccgtgaacttgttgaataggtctatctattacaagaaccattgtttctttttccaattgcaagcagtagctttcgaacgtttcttaattcactttcagcctgaagtccagattgaacaacaaatccagctaaagtcggttcatttttactgggctgattccccc

SEQ ID NO: 41195 - DNA, 353 bp, Oryza sativa
  Clone ID: uC-osroM202035d03a1
atggggacttgaagaaaaagaattgcattaaaaaaagaggatgatttgggtagaagtttttattgagaaagaggcatacagaatgggacaaatacagaatgtagaaaaccaaaccaaaccaaacacgatagccttgcttacagactcggtttttacaggtagataatccaagccaagcattgagttaaagagcttcagggattgttgcttaaagacacttgaacaggatgaggatgaatagatgcccattccaggagggatcagcatcgcaggacgggggaaagaaggcctttggtttaaatccaaggcggaaaggaaggcacgagaagaagggtcacacatggttttttatt

SEQ ID NO: 41196 - DNA, 489 bp, Oryza sativa
  Clone ID: uC-osroM202035d04a1
ataatgatggttctgctttggtacctcgttgatgccttacaaatgtcaaatcaaatacaacctgacagttttcaaactgacaccagcccaggtgaaaaggaaaacaacgaagaaaactgcaccgattctaagaaagaaccgaatccaacacactataaaaaccccagtgaggggagagaaaagaaattccgggttagtctactgagccagcagcatctcttggacggttctgtacagatgtaaaagctgttctatgcacgcaggcaattggtacctttgttatatgcaaaaccataatggctagtgaaatacgatgctaaggaatgcttccctttcaagattgatgcgtagctgccctccaattcttgtgacaaactgaagtgtccagctgatgggttttttggaagaacttgaccttataagcgcaggaggtaacccagagaagtaccaagaagtgccacattaaccacaaacagcaaggggaaaccc

SEQ ID NO: 41197 - DNA, 329 bp, Oryza sativa
  Clone ID: uC-osroM202035d05a1
gccgccgaggtggaggcgcggaaggaggagacgccggcggcgccggccgaggctgtggccgaggaggcggcgcccgccgaggccgaggtggcggagaccaaggaggcggagccagctgcggccgagccggcggcggaggaggtgaaggaggccgagcccgagccggccgagccggaggccgagcctgccaaggaggaggtggcgccagagcccgccgccgccgccgaggcggaggccaaggaggccgagccggcggcgcaggtggccgaggaggtgaaggaggaggaggtcgcgcctgtcccggccgccgaggaggtgaaggtggagga

SEQ ID NO: 41198 - DNA, 386 bp, Oryza sativa
  Clone ID: uC-osroM202035d05b1
actctcagaaacgcacccattacacgatgaaaaccaatcaaacacgaaaaaaaaaaagcacaaaagaccgacaaacaacgcctgcgacgacggaggcatgtgggggccagagaggggcaccgcgtcactgacgctgggccccaccgtcctcgatgacaaactcttttatttagccccacgtgacgcgtacccacacacacctacggagtcgagtactaccactccagctcactcaactcatcactcgctacacgcacacgtacgtacaactccggcgagtcgccggcggcggcggcgcgcgcgggccatgcatgtactccacggtgtacgacgacggcgagccagccttccccggcatgcacttactcgctggcctttttggcttc

SEQ ID NO: 41199 - DNA, 474 bp, Oryza sativa
  Clone ID: uC-osroM202035d06a1
gaaggggattacaggcttagatgcataagaacagttatgcaatcaaccggtataatacaggcccaagttcaggctatctgataaggaatacaaatgttgtttctttagacaggccttaagaaaaattgtcactataacaataatccatgctcattcgcccaacaagtgggcataaaattaatagatgcacaaagcaaggggatttggcttttctagagctaccgatcttcagatgccagcattgataaattgctctgagctcttagtagggaggatccggattaaatgccaaggattccctccagatgagttcttttatatgttcttcagtaaaggatggttgctcaaaatcaaagctgaaaggtgctgggcaggtgggttttttattgatgtcatgaagagaagccaagtatgggtgatgaaaagccttatcaacaggtattcgtttgtttgggtaaaacaccacattttttt

SEQ ID NO: 41200 - DNA, 398 bp, Oryza sativa
  Clone ID: uC-osroM202035d07a1
atcttggcgcgatacgatgtgtcgtcgtaggggcggcggtagaagcggaggaacggcaggaaggactcgcgctcccgctcgccgcggctggcctggccgtccttcttgaacgcgaacagcatcgacggcgactgcaggaacgacggccgcggcgtccgcgggaactgctgcgctggcgccggcgccttctgcccgcccttggtcgagaacggcgtcagcggtgcgccgcggtggacgggcggcgtcgtggtggagcgcgcggcgggggaggcgaaggagaaggagcgcgccgagagcggcgacgcgccgatgagggacgggctggaggtcggcaccacggagcgaggccccaccgacgacggcgtggtggtggacaggtaccacggcttgagggtgtt

SEQ ID NO: 41201 - DNA, 85 bp, Oryza sativa
  Clone ID: uC-osroM202035d08a1
tttttattgggtttttttatttttttggggttttatcttttttaaagcgcggaggggaaacaaagaatataagcttcatttttaa

SEQ ID NO: 41202 - DNA, 180 bp, Oryza sativa
  unsure (1)..(180): unsure at all n locations
  Clone ID: uC-osroM202035d09b1
attttattttttttttttgtatattctatttatttttttttttttttttattatttttttatttatttaanaaagaaaaanaaaaaaaaaaaataaaaaaaaaaaccaaaaattaaataaaaaaaaaacaaatgaagaaaaaaaacccaagcaggagacaaagaagacccgaccgccaca

SEQ ID NO: 41203 - DNA, 558 bp, Oryza sativa
  Clone ID: uC-osroM202035d10a1
gggttccacgtgtggttattttacacagaataccgtgaaacacttgggatgagatgtcgaatttatgtaattgcctagctaggattttacaggtattacacaatattaattcaagaccgagttactccccaaaaaaatgaagccaacttatagagatcccaatagcctttatgctaaagagccagctaaagaaatggtttgtgtacaggtacaacaaaaaacaagcattctcctccctagccttggatctttaaaacctgcagggcttgttgccattgtttccatgcatcaatataagttcattggatgcgattgatcagaaaccttccctggagctattttttaatgccgatgtggttttttgcatcctataccacaatcttaccatccaattctgacgtgctgaactggttgacaatactgccgtttcctttttttaatggcacgatgcaagttatgcaattttaatgaaccaccaccccgagggtttgatggtacaacagtatcattgcttgtcacttgctttgattgcccatttacttttccaaggcttaaaat

SEQ ID NO: 41204 - DNA, 498 bp, Oryza sativa
  Clone ID: uC-osroM202035d11a1
ggggtagaacttttaaaagatgccgtatatatatatttgcaccatgccataccgtgaagaacagggtgaacgaagaaaaaaaagagagaaggactattctatgtgttgatatacctacagtttttctttccagttgtgagaaaatttcagcgggcggtgagcgtcaacgccccaaccacctcgaccgatatatagaataataacgcaactccactgtggttggctagcccccacgtttgccacggccacatgacgattgatcgatcgaagcgattgcgccaacttgcacccaacgaaccgcgcgctggctccgtatactcccccttgcctagtcaacgtacgcgccgcacacctttctgatctcgccgttgtcgccggtgagcacctcgatcctccccatgttggtcatggccttcgcgtagtccctgaagtactcgttcgtcgaattcgcggacgccatcctctccacgtactgcttggaccacttgtcattgagga

SEQ ID NO: 41205 - DNA, 489 bp, Oryza sativa
  Clone ID: uC-osroM202035d12a1
atggataagaagctggcatgtgcttcggctagtagcattgcaacgcaaacagtatgacaaggtaccacgcattgtttaagagctaagacaaagacaaaactgatgcatccaacgtaccaaaaagaaagcgaacagcagcagtcagatagctatgagaagagaactaggagagggataactagaagggacagaatggcatccatgggtccatgacgtttagtcgacctcctccatcttgctctcgccggcgtcgtcctccagcggcggcatgtcggcgtcagccttggcggactcgtcctcgtcgatgctcaggccgagcttgagcatgcggtggatcctggtgccgaaggtgttggggtcctccaagctgaaaccggaggtcagcagggcagtctcgaagagcagcatcaccaggtccttcacggacttggcattcttgtccgcatcggcacgcttgcggagctcgtccatgatggcattctccgggtt

SEQ ID NO: 41206 - DNA, 517 bp, Oryza sativa
  Clone ID: uC-osroM202035e01a1
ggaatgcggtgaattggcgggagtccgttcgtggagacactttcttggccgtgagttcttggttcgtgcgccatggacggtgcgaaatcggggaagcaatgccatgtctgccagatctgcggcgacggcgtgggcacggcggcggacggcgagctcttcaccgcctgcgacgtctgcgggttcccggtgtgccggccatgctacgagtacgagcgcaaggacggtagacaggcgtgcccgcagtgcaagaccaagtacaagcgccacaaggggagcccgccgatacttggggatgaaagcgatgatgttgatgcggatgatgctagtgatgtgaactatccaacatccggcaaccaggaccataagcacaagattgccgagaggatgctcacctggcgcatgaactctgggaggaatgatgatattgcccattctaagtatgatagtggcgagattggtcatcccaagtatgacagtggcgaaatccctcggatatatattccatcggtcacttcac

SEQ ID NO: 41207 - DNA, 375 bp, Oryza sativa
  Clone ID: uC-osroM202035e02a1
gaatgcggcgaattggcggggggccgttcgaggagacactttcttggccgggagtgcttggttcgggcgccatggacgggcgaaatcgggaagcactgccatgagtgcgatctgcaagacggactgggcacggcggcggacggagagctcttcaccgtctgcgacgtctgcgggttgccggagagccggccatgctaccagtacgagcgcaaggacggtagccaggcgtgcccggagtgcaagaccaagtacaagcgccacaaggggagcccgaccatacttgtggatgaaagcgattatgttgatgccaatgatgctagtgatgagaactattcaacattgggcaaccaggaccataagcacaagattgccgag

SEQ ID NO: 41208 - DNA, 492 bp, Oryza sativa
  Clone ID: uC-osroM202035e02b1
acagagcgacatcgatttcatattcccattaaacgcagcagaatgttgtcaggcctctttcagcaaagttgttctactaacttaataatcaacagatgaacagcaaggtaccacttactacttcttaatacataacatgcataccgggagctaagatcttacagtagactatatagagtgatccactaataacttacacaacataatggatagccaaccggcgattctttgcctactatcttggtcactactagcagtcgataccacatttttgggtatcatggcctgcgacacgggtggtgaatggatcgattctaacccacagctaggagaagatcgatgcaaggaggatggcccaaacaacaacagtggacggtgtacggctctccgtcccatgagacccttaaggtaggtgttcaggcggacaattacccaagatagcaagagaagagcttcccaaagagcggaccccatgactggtatcaaatgtta

SEQ ID NO: 41209 - DNA, 259 bp, Oryza sativa
  Clone ID: uC-osroM202035e03a1
aactggaaaaattattggtaaaccttagctcatatatagttaaatataaatcaaaacctcagcaccaattctgtcccataagaacaataacttgcagtaagcacaggcaaggcatatattgcaactgtcgagcaaacaaaaaaaatgcatatacctcactatttcctaggtgtgtggcactatagcactaaaagtgtacaagcacgattttgaagagaaaatggagcggttaaagagtacggcaatagcatttagacta

SEQ ID NO: 41210 - DNA, 514 bp, Oryza sativa
  Clone ID: uC-osroM202035e03b1
gtgttctgtaagcagcgtggattcaccagttgttatatatgggcttgccctcctgttaaaggtgaagattacattttgtattgccatccagagattcagaagacaccaaagtctgataaactgcgtcagtggtacttatctatgcttcaaaaggctattaaggagaacattgttgtcgagttgacaaatctctatgatcaattttttgtcactgcaaaagaatgcaagataaaagtatctgcagctcgcttgccatattttgatggagattattggccaggagctgcagaaaatattatcaaccaacttcaactagagggtgatggtaagctgctgaagaaggggagagtaaataaaattatcacaaaacgagctttaaaagctgccggccacactgatctaagtgggaatgcttcaaaagaggctatgctgatgcaaaaacttggagaaatcatttgcccaattaaggatgatctcatcatggtccatttgcagtattcgtgcagtcactgtt

SEQ ID NO: 41211 - DNA, 412 bp, Oryza sativa
  Clone ID: uC-osroM202035e04a1
ataacttggccattcatttataaagatcccgaacttggtttttttttttttctggttccccctttggttttagactttaaaaaggccctagaagtttaccaaaattacaaacccccttattaccattttaccccccaaaaaaaccccaaaaaaattccgggggggggtttctaaaacaaaataaaaaaccccccccaatttggtcacccaacaaaaacgacagagaccagaaaacgacgaccactaacgctaggcttaggtgtacaaaggtggtcccgattcccaacgatcgaacgatttacccccgcctttgggggttcacccgagaagggctgaacgcgactccctgagcttttttgctgatgcttggggaaaaaaaacctcacctttttcttttttaaggtcacggggg

SEQ ID NO: 41212 - DNA, 527 bp, Oryza sativa
  Clone ID: uC-osroM202035e04b1
ttcatcgccatcgccattgccgccgacgaggaagaggagaagcttcgagtggagcgatctcgatggacccgtgcccgttcgtgcgggtgctggtcggcaacctctcgctgaagatgccggtggcgccgcgccccgccggagccggggccggggtgcacccatccacctcgccgtgctactgcaagatccgcctcaacaagctgccgtaccagaccgccgacgcgccgctgctgctgccgccctcgccggaggcatcggcggcgccggcgccagcgccggcgacgggcgcgctcgccgccgcgttccacctctccaaggccgacctcgaccgcctcaccgcgaagccgtcgctgttcgggtcgcgcacggcgaggctgaagatcgtggtgtacgctggccggaggggcaccacgtgcggcgtcagcggcggctccgggaggctgctcgggaaggtggtcatcccgctcgacctcaagggcgccttcgcgaagccggtggtgtacccacagaagctgatctgcatcggg

SEQ ID NO: 41213 - DNA, 458 bp, Oryza sativa
  Clone ID: uC-osroM202035e05a1
agcaaaacggagctgtgtaaagatttatttatgcgcttctctcgttttggccgaatcagttttaacaggagggaacctgtctttccccctccaattcattgaaacaaaatttacattagtaagatatatcctaatatcctactccttccagcttataaaacattatagcgttaaacaagattaacaatggatattaacaatttaacatgaggataacctgcaccttttctttatgaaaccaaagcgaaaggaaatatgcaagatcaagacatgtttcaaatcttctatatattagacaagaccaacaatgtgtcttcagagttttggatagaggtgaggcgcctggctgtggataatcgctattcctgccgagaagcattgcaaaggcgaaagactggagtcgaagtatatgatgtgcaggtcatctgggatgttcacaagcctgaacaattggccct

SEQ ID NO: 41214 - DNA, 493 bp, Oryza sativa
  Clone ID: uC-osroM202035e05b1
gtctgtgcttagcttgcaggccggctttggatgctgcgtggtgagctctgaggtgatcaaggtctcgtttcacgacgagtagtagagttcccattaccagagctaaagatggaactcgtctacttggaaaggagaaatggattcgatgaagatagcacctctccagagttcagtggaagccattgccatcagatgagaagaaaagcaggagctgccagtcatgtcacaagtcaccatgttcttgcaggagcgaagtattccattcagatttgtacccgacacttcctgcgaagatgatgatactggaattcctcatcagaagcctgaggcacccaagaagaacccacaatgtgagtgatcttgatgaccatgatcagcaatggagcttgcacagggagtgtagttcttggtccctcggagaaaatgatgttggattctttgcattcacttgttgatgcgaaaaccaggccacaaagtctttattctttcacta

SEQ ID NO: 41215 - DNA, 463 bp, Oryza sativa
  Clone ID: uC-osroM202035e06a1
ggttagcaaaacggagctgtgtaaagatttatttatgcgcttctctcgttttggccgaatcagttttaacaggagggaacctgtctttccccctccaattcattgaaacaaaatttacattagtaagatatatcctaatatcctactccttccagcttataaaacattatagcgttaaacaagattaacaatggatattaacaatttaacatgaggataacctgcaccttttctttatgaaaccaaagcgaaaggaaatatgcaagatcaagacatgtttcaaatcttctatatattagacaagaccaacaatgtgtcttcagagttttggatagaggtgaggcgcctggctgtggataatcgctattcctgccgagaagcatttgaaaggcgaaagactggagtcgaagtatatgatgtgcaggtcatcttggatgttcacaagccctgaccatggtccctt

SEQ ID NO: 41216 - DNA, 523 bp, Oryza sativa
  Clone ID: uC-osroM202035e06b1
gttcagtgcttagcttgcaggccggcgttggatgctgcgtggtgagctctgaggtgatcaaggtctcgtttcacgacgagtagtagagttcccattaccagagctaaagatggaacttgtctacttggaaaggagaaatggattcgatgaagatagcacctctccagagttcagtggaagccattgccatcagatgagaagaaaagcaggagctgccagtcatgtcacaagtcaccatgttcttgcaggagcgaagtattccattcagatttgtacccgacacttcctgcgaagatgatgatactggaattcctcatcagaagcctgaggcacccaagaagaacccacaatgtgagtgatcttgatgacatgatcagcaatggagctagcacagggagtgtagttcttggtccttcggagaaaatgatgttggatttcttgcattcactttgtgatgcgaaaacgaggccaaaaagtccttcattcttccactcaagaaccaagatgagaaaagctcggtcaa

SEQ ID NO: 41217 - DNA, 358 bp, Oryza sativa
  Clone ID: uC-osroM202035e07a1
ggggttaatttttatttcgtggttattgtttagtgtaaacagttaattacactcatacattacattgattcttaagggggaaagcaagaataacggggttataaacttatatgaagcaaaattgctaacatggtattggtcagtatatgcataataacagtggtcagggagagactaccttactaagactaaacccagaaaacctttttgtgggactcttccaggaccccttgcgaccatatagatacttgccacacggatcagggagacagaggttaataagcctacataggttaactggcttttcgcggtttatgggatgtacagggtttttgacaatgactagctcggaagtatc

SEQ ID NO: 41218 - DNA, 344 bp, Oryza sativa
  Clone ID: uC-osroM202035e08a1
aggtgaatgaattacataaaatctggcaaaactggaaagaacacatggaacagtatatgacacgtttacaagattactaccaatttaaggctagtttagtgtgtaaatagtacaaaaacagccgtggggttccttttcctataaaccgggttaaaggatcaacaacaagcagatgtggttcaagcattttacaacactgaaatcactggcagatttaatcttcacgttgatttcttctgcaacaccgaagcattagactaggatttttcacacagaacaaggactgacgatgcttacaaattccgggagagcaatttattgccttaaccatttaacaccttaag

SEQ ID NO: 41219 - DNA, 525 bp, Oryza sativa
  Clone ID: uC-osroM202035e08b1
tcggttctctcctcttccccgtctccgcctctattccgaactagtcctgctcctgcggatttcccaaccaccaccaccgcctccgctctatcaaccctcgctccgatccgcgccctccctgtctcctgtggtggatccgcgatggagcagcagccgctgctcgaggtagagcaatgtgtaacatctataccggaagatcatgaggccacttgttggggatgtggactccgtctcatttttgcaagttatgcacctgtttttaagtgtggctggtgtggagcaatcacacaaagtaaccaaatttcaagaaaacctgacagtgtatgcttttctcattggaggaatttccgggacaggttctttgtgactgtgcttatcctcttcatgctcttcgtcatatgtggtggtgtctgggcgatatatccagttgttttctcgatcagcacattttgtggcatctttcattgcatataacaggtctactagctgtatttaccatcacaagttattgcttggcctctttta

SEQ ID NO: 41220 - DNA, 224 bp, Oryza sativa
  Clone ID: uC-osroM202035e09a1
gccctttctacttttttttggggggataaaaaaagacggggtaaatattaataagaagctggcctatccttcggctagcagcattgcaacgcaaacaggtagacaaggaaccacgcatcgtttaagagctaagacaaagacaaaactggtgcattcaacgtaccaaaaagaaagcgaacaggcgcacgtcagattgcttttgagaagagaacttgggagagggg

SEQ ID NO: 41221 - DNA, 51 bp, Oryza sativa
  Clone ID: uC-osroM202035e09b1
tcgttgccgcagccgcagccgcgcgtcgtctcctccgcccgcgagctcctc

SEQ ID NO: 41222 - DNA, 407 bp, Oryza sativa
  Clone ID: uC-osroM202035e10a1
ggtgataaaaaaagacgttgtaagtatgaataagaagctggcatatacttcggctagtagcattgcaacgcaaacagtatgacaaggtaccacgcattgtttaagagctaagacaaagacaaaactgatgcatccaacgtaccaaaaagaaagcgaacagcagcagtcagatagctatgagaagagaactaggagagggataactagaagggacagaatggcatccatgggtccatgacgtttagtcgacctcctccattttgctctcgccggcgtcgtcctccagcggcggcatgtcggcgtcagcctcggcggactcgtcctcgttgatgcttaggccgagcttgagcatgccggtggatcctggagcccaaggtgttggggtccttccaagctgaaaccggagg

SEQ ID NO: 41223 - DNA, 428 bp, Oryza sativa
  Clone ID: uC-osroM202035e10b1
gatcaggagcacgcaaggcgcgcggccatggcgtcggagaccgagacgttcgccttccaggccgagatcaaccagctgctgtccctcatcatcaacaccttctactccaacaaggagatcttcctccgcgagctcatctccaactcctccgatgcattggataagattaggttcgagagcctcacggacaagagcaagctcgatgcgcagccggagctgttcatccacattgtccccgacaaggctagcaacaccctgtcgatcatcgacagtggtgtcggcatgaccaagtcggacctcgtcaacaacctcggtaccattgccaggtcggtgaccaaggagttcatggaggcgctcgctgctggtgctgatgtgtccatgattgggcagtttggtgtcgggttctactccgcctacccttgtgctga

SEQ ID NO: 41224 - DNA, 448 bp, Oryza sativa
  Clone ID: uC-osroM202035e12a1
gggggcttgttggatttttatggtatactgaatacatcaacaatattacaatcttctaaaatcctcccataatatgaatctcaagaattgaacgaatgaccataagcgctatattacatataacttctgtgagtgagcaattgaaagcccttgatgatgaacattcctaagaatatatccacctaagtttttaagttttcagccaatagatgctacagggtaaattctcttcacaaaaccatggcctgagggggtccgtagccgctccggtgcttcttctgccatgtccaggcaaccctgaggctttccaggagatcggtatgttgagcagtccagttcagctcgctgttgatctttgcgggatcgctgtacactttggcatatcaccgggtcgaccagggaagtagtcgaccctgatgtcaactcctgttgctttcttgcaagcttc

SEQ ID NO: 41225 - DNA, 463 bp, Oryza sativa
  unsure (1)..(463): unsure at all n locations
  Clone ID: uC-osroM202035f01a1
agcccgcgagatgggaaaccccctcagaaattgtactaatcgttccaaattcatcagcacacaccgttaattacttactacttgtatttatgtatttatgtatgtatatctcacaacggatacacgtcgaatctttattacttgtgtccttcaccggcagtcccctgatattcttcagcaagcagcagcagggaagcagtagcctcaggcgtcatccttgtctgcaaagatgtcaagaagggagagcgcctcggcgacgctgagctccagcctgaacttggggccgtcgtagtggtggaggatcggccggaaggcgtcctcctccagcgggtcatagatcttcctcgtcgcaaccttcacctgtgcagggaagcgcgactcgccggggcacttcttgtccttccacgccgtnggatcgatgttttgtccgccaaagctcgcagcctcgaagatgccgtggagc

SEQ ID NO: 41226 - DNA, 471 bp, Oryza sativa
  Clone ID: uC-osroM202035f02a1
agcccgggagatgggaaaccccctcagaaattgtactaatcgttccaaattcatcagcacacaccgttaattacttactacttgtatttatgtatttatgtatgtatatctcacaacggatacacgtcgaatctttattacttgtgtccttcaccggcagtcccctgatattcttcagcaagcagcagcagggaagcagtagcctcaggcgtcatccttgtctgcaaagatgtcaagaagggagagcgcctcggcgacgctgagctccagcctgaacttggggccgtcgtagtggtggaggatcggccggaaggcgtcctcctccagcgggtcatagatcttcctcgtcgcaaccttcacctgtgcagggaagcgcgactcgccggggcacttcttgtccttccacgccgtcggatcgatgtttgttccgccaaagctcgcagcctcgaagatgccgtggagcttgtgggt

SEQ ID NO: 41227 - DNA, 498 bp, Oryza sativa
  Clone ID: uC-osroM202035f02b1
gtcctctagccaagcagcacgagcacacgagaaaacaagagaaaaaaagcagcagcggccatggagggatacgaccgcgagttctaccagttcagcgaccagctgcggctgcagacggcgagcttctccggcctctccctcggcgactccatctggtcctccccctccgaccgccgcaacgagccggccttcgacggcgagtaccaccacttctcctccccctcccccgccaagaacgccatcgccaacatcaacggcgtcgccggaaacctggatggcccgggcctcatcggctccggcaagctcgccttcggcgccaccaaggccgaccgctacaacagcgtcaacctccccgtcgacaacaacaacaacaacaagtcctacggcggcgccgccaagatcaacaacaacaacgtcaacgccttcgggttcaacaagatggggggttacaacaacagcagcaacggcgggggaaactactgcggcaacggcggcgac

SEQ ID NO: 41228 - DNA, 521 bp, Oryza sativa
  Clone ID: uC-osroM202035f03a1
gaaaaccgaaacatataatcatgacatgaaggggaaaaaacactcctgtttgagtgcaataacatcacatcaggttcagcaatatcaatcaacaggttctaacttcgttaacaacaataaatcacagagttagttaatgtgatagcttaaactagactgctgacatggtagcctttacatgttctaatattctaatgtaatcgtagaagagcgcggagtgctcgccctccagaccatctcggtgatggcggttgctgccagcaaggttgttgcacgggctgccaccaatcaccaggtcaaaaccgccaaaccttctgatgaatgtttcaattctttcagtagtaagatgccgcacgtcggcgatttcaatcagcgttccagtttgtgtctgatcccaccagctcttcagaatcgttctgttcacttctgatttctcaacagagatcactgttttcatatgtatccccagtcttgggagagctacctttgctccttcaataccagaaaacagggataagaca

SEQ ID NO: 41229 - DNA, 515 bp, Oryza sativa
  Clone ID: uC-osroM202035f03b1
gtcgttcatcgccatcgccttcctcctcctcctcctccgccgccgcgcgcttcctcgccaccgcgcgcccagggccatcggcggcggacgccctcgcccacgcgcgcgagagaggggggcgagagattatcggacgagtcgctttgcggagctttctagaatggtggactgggcttcagatagcgacaatgataagttcgagtgggacacagacggtgaggctgagacctcatctgccccggccctaaggaacatagatgctcctggtccgtccacgaggctgccgcaggatgcaaatgggaaggccaacgggtcaggtgctttggttgctgaatttatgggaatgggattcccaaaagaaatgatcttgaaagcgattaaggagattggggatacagatacagagcaattgcttgagttacttctgacttatcaggcaataggcggtgacgcttcagtgggtaactgctcttgttcgggctgtgccccccagactcttgaagtcgacgaggagg

SEQ ID NO: 41230 - DNA, 300 bp, Oryza sativa
  Clone ID: uC-osroM202035f04a1
ttgtccacccacgcgtccgagcggccggccgttttttttttttttaacttcaacaaggcagatatattagaatggttcttttactcagcacagcatagcatggtatcctcagtaaaccagagtactactacccttaacatttcagaaaaccttaataaaaagcatcatggaatcacatcctaagcttgcataaacactgaaacatccataaaacaaaatccgcaggcagcagccggtgccacctcctgctcagaacccaagcttggtgcggcgccagtgcctgcgcttcgcgttatacct

SEQ ID NO: 41231 - DNA, 386 bp, Oryza sativa
  Clone ID: uC-osroM202035f04b1
gtcgtctcttcgtccccgccgcgacgatgccgtcccacaagaccttccgcatcaagaagaagctggcgaagaagatgcgccagaaccgccccatcccctactggatccgcatgcggaccgacaacaccatcaggtataacgcgaagcgcaggcactggcgccgcaccaagcttgggttctgagcaggaggtggcaccggctgctgcctgcggattttgttttatggatgtttcagtgtttatgcaagcttaggatgtgattccatgatgctttttattaaggttttctgaaatgttaagggtagtagtactctggtttactgaggataccatgctatgctgtgctgagtaaaagaaccattctaatatatctgccttgttgaagtt

SEQ ID NO: 41232 - DNA, 379 bp, Oryza sativa
  Clone ID: uC-osroM202035f05a1
agaagaggataaaaccatttgttgaccattttatttggatttacaagccatagggccgacaggcataaatccgggggcatggatccttacatataaaaacagcatgcatgaaaaaattttttaaataatcaaagaatttttaaacaaacagataagctgacagattaatttaaccaatcataggtggtacctagctactaaatcccccggaagaaaccaacaactggtgcaaaatagtaagaaatggggaaaaacgatcaataatacacgggtccacactttccacagacacgtggaaattaaatgggaaatcaatacagttctactaggaggaggaaataattttcccttggttgatccagctttttttagttttttt

SEQ ID NO: 41233 - DNA, 457 bp, Oryza sativa
  Clone ID: uC-osroM202035f05b1
gtcgttagtagcgagcagcagctggtcgccaacgcggcggcgacgacggtggccgggaacgggagcaggttcgcggtgacgtgtggcttgctcaggcagtacatgaaggagcacagtggaagcaacggcggcggtggcttcttgccggcggtgacggccatgagccttatgaccggcggcgctgatgcggaggaggaggcgccggaggtgaggaagaccatggagctcttccctcagcaggctgggacgctgaaagacacgcaagaaaggaaggagatcaccgagaaggcgcagctgaccatcttttacggcgggagcgtggtggtgttcgacgatttccccgccgagaaagccggtgagctgatgaaacttcgccggcttccgcgacagcacggtggtggtgggcgtcttagacgccggcgccgtagcggggcagtcttgcctaccagacatgccc

SEQ ID NO: 41234 - DNA, 301 bp, Oryza sativa
  Clone ID: uC-osroM202035f06a1
accgggtaccccggccaaaacttttagggaaacaaaagattgatcccgggacacccaacgggcctgttgaagtttgacagcaaaacttggcctgggattaaagggatggttttttaaaagcggggacccattttttttggccattcatgaagggtcggggttatcccgccgcaatttaagaagccaatatggggcccccccccggtttggaaaaaccaaaggcttatttttacagggtttacaggggaaacttattcggtctttgtaggaaaggggggggctggtttctcagtttgacttt

SEQ ID NO: 41235 - DNA, 454 bp, Oryza sativa
  Clone ID: uC-osroM202035f06b1
tttactcttgaagcagatggacttaaggctgacataattattgtggacgttgagagagataagaagcttttcatgttgaaacagcttagtggcgcacttgtgaaaggattaaactctagtccagctttggtgataaagaaaatagctggcttggtttttgactgcttcaagagcctagatcctgatgtaagtcctgcaagatctccaactgaagataatcatttctttggaaacaaagggtcacaacttctagggcagataaagcatggatcatgccgaccccgagctatcctgtttaaggttcttgcagatgctgttggtcttgagagtaaacttgtagtgggtctacctgatgatggtggagttggatttgtggattcctacaaacacatgtcccgggttgtttcactgaactctatggaactgctagttgatcttatgcgatttccagggc

SEQ ID NO: 41236 - DNA, 357 bp, Oryza sativa
  Clone ID: uC-osroM202035f07a1
ggagaataaatcacaagaccaataaatcattattacgcacgtatacacgatcgaacgtaaacaaaataatcaaacaaatttcatcagaaacgctacaaagaatcatgcattgcctccaccctgccaacgtccatgccgctcgacgcgtcaatgcgatctcagaagagggcgagattgaggaggatcccaacggccgccgcgacgacggcgccaccggcgtgcaggtgtgcggacgcgctggctggcgtggagtaaggcccaatccaaggttgcggcctcggggtggtcgtggagttggagacggtgacggcgagcttcatgccgctggcgcaatggttgccgattttgcagatgaag

SEQ ID NO: 41237 - DNA, 452 bp, Oryza sativa
  Clone ID: uC-osroM202035f08a1
tcttatagcgcgacaccgatgtggcgtccgcggcgcggagcccctgagtgttcgccgccctttttttttttttagtcggttttttaaaaggcttgcaagaatatcgaagaacgaaattacagactcaaacatgcatatgtcagcatccaacaacataaatatagaaagacaagaatgacaccaccacctctgctgtcacccaccccagccggatttgatggccgccaagcttgtggctgccaaattaaggccatgagctccgagggaaggaggcgaggcgactggccgaatttgaccgccggttgcacattttcgcacgctggcacgagcctcgttagcctaagccgccgctaaatcactagctagaggtggtgatggatctggaagggcacgacgaggatccaggggagaagcacattaacgatgtaggtgcggatcccatgaagaagctt

SEQ ID NO: 41238 - DNA, 474 bp, Oryza sativa
  Clone ID: uC-osroM202035f09a1
ggagagaatgtcaaagaaagttgaccaattggtcgattttataaattattaataattgaacaaatcctcatttacatcaacatattataccacgcggccagccctgcgggcgattcatggcgattcagctggatgtgccgagagcccaagccgaatccaaccccccacagtgcttggttgatattgtacagtagcaactgggggaagaggagtagagtagccgcaagaacacctctcagctcaaggaaggcatgggaagaaccccctctatacgttttgtttcactagcctactattgtttctatttacacgcaggatctccaaatcctgccctccaaagagatgacgatgacagatacatcgtcatggtatcgccgacgatcaccatgtggtatctcgatcagttcatgaaagtccattcctgctttgttggcagcacggaaaagaacttcctccacaagatgttgggcaggg

SEQ ID NO: 41239 - DNA, 369 bp, Oryza sativa
  Clone ID: uC-osroM202035f10a1
actagttctagatcgcgagcgggggccctttatttttttttggttttttttttttttttttttttttacaaaaatacacaatagcatatcttctgttgcaatgaaatacatgtacataagacctcataagatcccagcaaaagaaagaaaagaaacaagttgggggaaaaatggtgctttcatgtccacctcaactcaagaaaaaagggaaaacacttggggcatcatatatatatttacaacaatgagaatggttgaacaatgggacaacatcaaaagaataatatactacctaccttttttctttccttcctttaaaaaaataagaacaatgccttattacttgcccctagaggtataacctggtga

SEQ ID NO: 41240 - DNA, 529 bp, Oryza sativa
  Clone ID: uC-osroM202035f11a1
ctcaagaagggcattttctcttgagttggacgaaacggtacagaggagtcgctctcccgtggcctggcttagcccgcgggggatcacgacgttcttcccttttgactctggcgatcgatgaatcgatccatccgtccatcatcgctcgcctcgattattcgacctatagctgcatctgcatgccagcctgctttcaggcgggcaacctagcttacatcccaatcagggcctcttcatcctccctgtattttctccccaatttctcttctcttctctactcttctcctatagttgttggccaaaaaaaaaaactaagcaaaaaaggataaaaaatggttggttttacaattaagggccacttctttggggcgctccctagctcagatgtctacgtagggtttggtttttttcatcaactcctctgctcctcctctcgattgccaaccgtggtcctagctgaagaatctgtacaaggactctgatgatccgtgctaatacggaatccaccgttcgggctcccgctcccact

SEQ ID NO: 41241 - DNA, 530 bp, Oryza sativa
  Clone ID: uC-osroM202035f12a1
cgggggcgccaaaaaccaatagtgagagaacaaggagtatgacagccactttaattttcttttactgtggataagtgataatctgataccaagcattacacatgaacagagtagagaggagggatagctagagaaggggaatctgtacacagccatcccaggtaaaaccttttccaccaataaatatgtaaagataaacaaaatgacacatttaagttgactaaccgaaacatgtatattgcaatctgaaatgttgcctccaaagctccaagcccaggtgtaattcaaagtagtcatctcatcctgtaagcccaaccatgttcactcaaaaatgcatggacagcttccttgatggcaaggttaggaaccagttggtgtggttcaagtgtctcacgggtcacaggatcaaacttccccaccctatgaagatgatcaagaatcaccgcccttttatacgtgattccacttggggttatcaccgggtctctgaaaatatcaagagtaattttgcagcagagatgatcaggaac

SEQ ID NO: 41242 - DNA, 523 bp, Oryza sativa
  Clone ID: uC-osroM202035f12b1
gtttctccaattttccaagcctgcctccaagcgcacgccacgatcttctagaagcgattcgcgcgcgccgccgcctcctcccctccccttccccggagcgaagccgccccgccgggggggatgtcgccggcggcggacagcgcggcgtcgaagcggcaggcggagctgctcaagcaggagggcaacgccttcttcaagaaggaccgcatcagcgccgccatcgacgcctacaccggggccatagctctctgcccaaaggttgcagtatattggaccaaccgagcactttgctacaagaggcggaatgagtgggttagggctgaggaagattgtagaacagctattcagcttgacagccactctgttaaggcacattacatgctcgggcttgcacttctcaacaaggacgaattggccgagggaataaaagaactagagaagtcgttggagcttggaaggtgtgcacattcagcaagttacatgtttgaagagatctggcaagagctttctaaagcaaaataca

SEQ ID NO: 41243 - DNA, 211 bp, Oryza sativa
  Clone ID: uC-osroM202035g01a1
gacaaaattcatccaaatcttggaattatattatagatttatatatagttggttatacatattggggatctgaacacttgcttcctttcgatgcctcaatggcttaaaaggagaagagtggaacaagaagaagaagaggaggaggattgggagttgatggaggagaaaatttgcaataaagaacctggcttcggatttgttgccggccgaa

SEQ ID NO: 41244 - DNA, 401 bp, Oryza sativa
  Clone ID: uC-osroM202035g02a1
ggcggcaggtgcggcggccgggcgcttgggcggagccgccgccgctttcttggtcttggcacggatggcgtcgagggcctcgacgtacttctgcacccgcttctcctgcactcggcgctgctccttgacctcgccgtcggcggcgatggagtcgagcttgaccagctcattcatcagcgcctcggtgagcgccaccacgtcggcgtcaaccaccctcccgcccttgctcacgatcgcctccagcgccgacaccttggaggcgagcttgtcgacgtcgagggcgacgcgggagacggacttggcggcgcgctcggccttgcaatggcggcgctcctcgaggaggcgcttggcctgggcggtggggtccttgaggaggagcattttggagcggtccttgaccc

SEQ ID NO: 41245 - DNA, 402 bp, Oryza sativa
  Clone ID: uC-osroM202035g03a1
ggttaacagaaaccccatccaaaccggaagcttttgggcttctttttttaaaacaccagacacacatacagcgcatggaagctttgtgtgatatcatgcactaccaaagacaaagcaacaggaagcgtgtttggaattacacagatgatccaggacctttaccctggcgcacatggtaaacaaaatgtacttcatgggagttcaatgcacagggtcactttgaatagcttcccaagcagcaattatttgggcattcatactggccactgattctgaaggtccagttttattaacccaacttgaccgccttgaatgggtgccagcttggccttccatgagaacagctggaaggtcgtccctgcttaaaactggggatgcatgccgtaggctaccccctttttt

SEQ ID NO: 41246 - DNA, 291 bp, Oryza sativa
  Clone ID: uC-osroM202035g05a1
gggatatatacaatggaacgggaaaataattgggtgcagatacggacacagacacacacgaattgacggtaccccacatacatacccacgttcatgcaagaagagaaaactgcaaagaaacaatggaggagacgatgccaacataaagaaagcggctatcgattagattacagaccgaacgatctcattgaaacgaccttaaagaattttacatggcacatataagtgtgtatatgtgtaccactagatagtcgagcttagcttgagtagacgaacctgccatttttatta

SEQ ID NO: 41247 - DNA, 477 bp, Oryza sativa
  Clone ID: uC-osroM202035g06a1
gatggacacacaagcaaagcaggcatgcagcttggcagcctggcaagaggattgaattgattatgtgctgttgtagacaaacagaatagagaggtacagtagagtagatgctaatgagcgaggagtatgaggtcgagcatgtaggcctccagctggagggcctccttggccatctctcccatgcagaacccaatggaagccaatgctaatgctactccttgatcttgctgctgctgctgctgtgacaggaacgaccgcaccagcatctctggtgcatcctcgtcgtcacagcaacaggtgtcactgccgctgctgacccggatgccggcctccaggtcctcctcgtctctgctgctgctgctgctgatacgactgagtcggaggaggaggtcggcgcttcgctccagggatgcggagaccaggcagtggaagcgctgcgttgcatcctcgtctgctgctggtattggagatgaatgt

SEQ ID NO: 41248 - DNA, 516 bp, Oryza sativa
  unsure (1)..(516): unsure at all n locations
  Clone ID: uC-osroM202035g06b1
tttataagccagacaagccaagcgactaatatatagttagaatcagaaagaatgccaccgtcgtcggcggccaccaccggcggcgccgtccataaaccaattatcatgccgcccgagtcggagaggcagatcaataatcttccagacgtactgcagccccgccggcggtggcggtcctcgctcgccacgggcttccgctcggccctggcctgcaccatcgtcggcgtggcctccatctacgctccgctcgtcatccgccgccacctcaccttcccggccttctcttacgtagtcaccgtcatcgtagtcaccgacgccacgctgggcagctccctgcgcggcgccctcagcgcggtccacgccacggccatgggcgcagttccatcggtgctgccactctggctggcgcaccgcaccggcgccggggagtcggtgctggcgacgacggcngtggtggcgctgagcacgttcgcggtggcggtggcggggtcggcggtgaccgtggcgaagcggatc

SEQ ID NO: 41249 - DNA, 216 bp, Oryza sativa
  Clone ID: uC-osroM202035g07a1
tttttttggtggtttttaaattttttgtgttttttttttttatttttttttttattaaattgttcatactattatatattctgaatttaacaagtaatattaagttaatttttttatacctcaaagaaaaaaggcgccaaaaaaaaaatatcgggacgggcccataaaaggaaaaaagatccccccccggggggcttaaaccagcgagccaacact

SEQ ID NO: 41250 - DNA, 297 bp, Oryza sativa
  Clone ID: uC-osroM202035g08a1
ggtggaccgcaccgtccacgccgactgcatcaacgcctccaacccctaccacgtctgctccgagtactgcttcaagaggatcgccgacgccaaatcagggttggagcgtgcggagcaagaaccgccttctgcagacgctggcaaatccgatgctgcccaagctgagggtggtggtggtgatgatgatgcggagcaggaggacgccggcttagacgacggttacccgcagatgacagagaagcagaagaagcttttttagttgtggctgaagatgaatgaagctttggaaggcaaatt

SEQ ID NO: 41251 - DNA, 433 bp, Oryza sativa
  Clone ID: uC-osroM202035g08b1
acacaacttctcgaatatgctatattctcacgacattacatccgagttggctttcttacagttacagtttccaagcaaattgttgataggttacaacttacaagcaaaagacagctggggaaacagacaacatgtccactctctaccagcagagtgtgcagagtttctaatctggcaaggcagtccccctttcaagattgttcttgatctcaagagtatacttgccaaatgccctctcaaccttcttgttgaagtgttcgttccggtcattgatcgagtcaatgtccttgtcttcatggaacttgcgcctcctgctgaatgctttccgtttctcatcccgttccttaagctcattaaccatcctgtctatgttttcttccgggaccttagacaccttcccatattggagacttgaagcgttccgataaaattc

SEQ ID NO: 41252 - DNA, 482 bp, Oryza sativa
  Clone ID: uC-osroM202035g09a1
gggagcaatatgaactaactgggttaacaacaataaatcacagagttagttaatgtgatagcttaaactagactgctgacatggtagcctttacatgttctaatattctaatgtaatcgtagaagagcgcggagtgctcgccctccagaccatctcggtgatggcggttgctgccagcaaggttgttgcacgggctgtcaccaatcaccaggtcaaaaccgccaaaccttctgatgaatgtttcaattctttcagtaagtaagatgccgcacgtcggtgatttcaatcagcgttccagtttgtgtctgatcccaccagcttttcagaatcgttctgtacacttctgatttctcaacagagatcactgttttcatatgtatccccagtctgaggagagctacctttgctcctccaatacccagaaaacagggataagaaatttatccattgggaaacaggtttttaatacaaagagaagggat

SEQ ID NO: 41253 - DNA, 324 bp, Oryza sativa
  Clone ID: uC-osroM202035g10a1
agcaagctgaaaacctttcataacccttgtagcatttgattggggaaacagaattttacaaggagattcagagcttccgaaactggaagaacagaaacccgagggaatggacacaaggaacataactgaaggggaaaggggttacattattatgaatgggcccaatttggaacaaggactaaaagtttttactgaggatttggtggcctggagttgtgcaaaaaaaaccttattcccattcagagggtttttgttggggggggccttgggcgcgatcaccttaatgaagcacagggagttttttttccccaggggcattccgat

SEQ ID NO: 41254 - DNA, 408 bp, Oryza sativa
  Clone ID: uC-osroM202035g11a1
gggggaggtaaaattcgacactactgttcttgacctttattcagattttacagcgttcacaaatgtatacaacagttaaatgccaagacttggcatacaggacggagcttttattcatgctgtcctccaccaccggacacgatttcaacgaggtgattcggatacgttagatatccttttgcacgggacagccttctagccagccaagattgaccagagaattttccaaggagtctatttggtctgcatcatgctgcattagccggccaataatcggtgcatggggacctgatttttatttgcttcctgtagtagcaatctgagaagaaattgcagtgagatgtagctttattcttttcggaaaatgatggttttaaccgagcttttgctaatgcggcaggtttgaag

SEQ ID NO: 41255 - DNA, 437 bp, Oryza sativa
  Clone ID: uC-osroM202035g12a1
aggggagcattaagccaacaggtcaatccagtatttgtacacatctagtccacacactacatacaatacatgaatgcatatgcaacacaaatttcagccaatatacacagcaaggggagcgatctgtacagacaatttaacacaccgacacatgcgaattcccagtgatgcatgacgaacgacggacagatcaatacatgtaacggcgatgttcacaaaaaatacatgtgatggtgaagtgaagccttgccgccacgaacggcctcctggaggctctttacggcaccgtcgtagttgacgaagcccatgaaccagaagtcatggttgtcgacagaaaccacctggatgtacctctctgctgggttctgctggcttgccgtaggagtgactgatcttagctgagcaacgggtacaactaccttgtagatggaagattg

SEQ ID NO: 41256 - DNA, 218 bp, Oryza sativa
  Clone ID: uC-osroM202035h01a1
gatgtaatgaagtaaattatatttaaattaaaatagtattctgctaagtcatcagactaggcttgcattgcctacacaaccactttgtaaaataaaaaggtttacaggggcctgcccttcccctaagaggttaatagtatctcccggctttgaaacttaatcaagggcttggtttgggggactggacaatcaattggcaattccccttgtcctgaaaa

SEQ ID NO: 41257 - DNA, 497 bp, Oryza sativa
  Clone ID: uC-osroM202035h02a1
ttttttttcagagaggttttttatttttttttttttttttttatttatatatttttttttttttttttttttttttttttttttttttaaacaacaaccagaagaaggccaaaaactgaaatttttcttataaaaaaaaagggggggcacaagggcaaatggtattttgggaaaatttattttggcaaaaatactgggggaaaagaaaaaaagtgggccccgggttttttaggggaaaaaaaagaaaaaaaagggggggccaagggaatgcttcgtcatttttgggggggggaaaaaaaaaaaaggttctaacctacaacagtaaaaatgtaaacagggggagaaaaaaaaaggggaaaataaaaaaaaggccccccttcgggggcaaatgattcaaaacccccttttttataagggaatttttttttgtaaaaaaaacccaccccccccaaaaaatgtgtttgaaaaaaaaaaaaattttttttttttgggggggg

SEQ ID NO: 41258 - DNA, 452 bp, Oryza sativa
  Clone ID: uC-osroM202035h02b1
gtgacacatatagtgtaggtttacttgcagcttcgtcgattaccagacggcaccggcgtcgcgcgagcgagcttgatcttgcgccttgtgcctgctagctgcttcggcggcggcggttatcttcttccgatctgtaacagccccgatcaagaaaggatccaacccacctaggaggactaacctgaacgtgctaatgagttcaaagctagtaacatcacctctgaaatccatggagcatggccatctagagcaacctctgcgcgatccgcaggcgccggcggagcagcatgacatggggttatctcctctgacgctcctcggcttcgcctttctgaccttcaactcgggaatggcagtgtacagatcagatagaggctttggcaaccatcttcttcgtggtcttcttctacgatgacctctgatcgctctttttattccttccattatttgag

SEQ ID NO: 41259 - DNA, 289 bp, Oryza sativa
  Clone ID: uC-osroM202035h03a1
ggggaaaaaaaatttgggaactaaacaagggcttcttttttacaaaccctggcccaaacacacaatgcctgggcccggaatttacagggctggccctacaaaagggggttagccccccattgggaaatttttttttccttccacacccgggaaggctggattatttgcactggaccaaagtttttaaaaaaaagggaacaccaagggccctacataaatggtgggggggtaccaaaatttggaacccaagcgttcaggatgttatgaaaagccaaagggccctttccct

SEQ ID NO: 41260 - DNA, 355 bp, Oryza sativa
  Clone ID: uC-osroM202035h04a1
cactcaggaagtatcaggttcaactattatagcatcaagccatcaacaaacttttgataatacagacattaacggcactttcagttcatctgatcctctcgggagaaaaagtcaaaaagaaaaaaaagcacccacagggggctgcatgctttatggaacgatatggagttcactgacttcgggatataacaaagcaagctggccaaacatgtcattaacttaaaattgggaggattaacttctacgatcatctggttgcaacccagaacactaagcaaaagacttgacggtagcagacttgattatgtccacaaattcaggcttaaatgaagcttctccaacaaggaatccatca

SEQ ID NO: 41261 - DNA, 380 bp, Oryza sativa
  Clone ID: uC-osroM202035h05a1
cagagcgaatatgttgaaaatggccaaacttcaacattttcttttttttaacgaaacattatgggtcgaactggaatagtaccaaatacacatatggttgttcacataacacaaggattacacgaccaatttgcagcaattaacaagacccaacagggcgatcacacattactaatagtacaagataataataattccataattcatccaaagctaagttctaagtagtattttggccacccacacggtgaagaatacgtgtggggtgggcttactgcgacgggatgggctgcatctccggcgccggcgaggtggcggcgtcggcgagcgggtagccgaacaccctggagaggcgctcggtggggacgagcgggaggtag

SEQ ID NO: 41262 - DNA, 468 bp, Oryza sativa
  Clone ID: uC-osroM202035h05b1
tttaattccaacaagaacaccttcgatttcgatccaccaatctaacacaacatccaatatccatggccgattcaggcagcgacgccccgatcagcaaccgccccgaggaggaggtgacggtggagaagacgccggagatggaggcggcggcggaggaggagaggctgaggtatctggagttcgtgcagcaggcggcggcgcaggtgctggtgctggcggcggcggcgtacgcgtacgccaagcagggcgccggcccgctccgccccggcgtcgaccacgtcgagggcaccgtcaaggccgtcgtcggccccgtctacgaccgcttccatggcgtccccctcgacctccttaagttcctcgaccgcaaggttggtgagtccgtccaggagctggaccgccgcgtgccgtcggtggtgaaggaggcgccgggcctggcccgctcggcggcggcggatgtgcggcaggcgg

SEQ ID NO: 41263 - DNA, 371 bp, Oryza sativa
  Clone ID: uC-osroM202035h07a1
ccttcaaagacaatgatactgaaaacctgtacttttcactcacaacagctgttttgcaatttgttcacactttctagacagccctgacatcaacaagcagcagcaggccagcagctgggactgggaagccgaatgccgagaaatgcgaaccggtcagacaaatcattggtggatctcgcatagctcccagtttccttctccgtcgatgagtttcagctccaaggaatggaaggggatcaaagctggcctttgcgaggaagtaatcacagtgatgcccatgctagttgcttgcttgtacaaatgctcttcaacatcaacgcttgtagcattcgtgcattcgtcaagaataccaaattttaggatggtggaaa

SEQ ID NO: 41264 - DNA, 307 bp, Oryza sativa
  Clone ID: uC-osroM202035h08a1
gtggtgattcatttgccattcattgtaattaatttatgcagtaccaagcatttgtgattacagaagtgtgctctagccaacaaattcgtcagtcatttctcaaaaaaatattcagtgctaaatgaatttaaaagcacccatgcaaatacaactggcatatacaaattaccaagatgactgggttatgagtatggaaaatattcagaacaaaaaatttaatatatttggtggaactccacaatgtccaaaaatattacttgaagctaaaaccaaaaatatttgcatttcaccttccatcatatgggac

SEQ ID NO: 41265 - DNA, 95 bp, Oryza sativa
  Clone ID: uC-osroM202035h09a1
gggaaaaaaaatttgggttctaaacatttaaggggaaaaaaaaatttcggtttcaaaattgacacagaaaaaccttatcccccaaatttcttttt

SEQ ID NO: 41266 - DNA, 143 bp, Oryza sativa
  Clone ID: uC-osroM202035h10a1
tagttggccgccggcggactcgctgggcggggggcttcgatggcgcgcgggaccgcggccagctccgagggggagatcctgccgtccccggccgcgtcgaagcgggtgaagaccctctcgatctccgcgtccgccggcgccaa

SEQ ID NO: 41267 - DNA, 154 bp, Oryza sativa
  Clone ID: uC-osroM202035h11a1
gggataacagaaacttcattgcaaaaactgcaaaagtagcagattacaccatatagtcacgagcgcgtccagcgtgctcaatttcaagcagacactagaattcagaacttgcgaatatagttgcaaaaagcagacaatagacaaccagtacgac

SEQ ID NO: 41268 - DNA, 505 bp, Oryza sativa
  Clone ID: uC-osroM202035h11b1
cttcctccctcctcctcggtgagccagtcatccaagctctgtcaagatgtctgacagccatgaaactgataggaacattgagatctggaagattaagaagctaatcaaggctctggagtcagctagaggaaatggcacaagcatgatctctcttattatgcctccacgtgaccagattgcgcgagtggctaagatgttgggtgatgaatatggtaccgcctcaaacatcaagagtagagtcaatcgtcagtctgttttggctgccattacctcagctcagcagaggctgaagctctataacaaagttcctccaaatggattggttctctacactggaaccattgttactgaagatgggaaggaaaagaaggttaccattgattttgaacccttcaagcctatcaatgtatcactgtatctttgtgataacaagttccacactgaagctttgaatgagctcttggaatctgatgacaagtttgggttcattgttatggatggtaat

SEQ ID NO: 41269 - DNA, 359 bp, Oryza sativa
  Clone ID: uC-osroM202035h12a1
ggggaaatcaatctctcttttcagattgccaacctttttatgattacaactatatcaaatcaatatcacactgagattataaagtcgttcgagaccacacacacaacacgcgtagctactagagctagctgatcatgagatatactacaattccaaattttccaacggcaaagaccactcactggttttaattagagacttttagtcgtttgtgtgttacacgctaattttaagctgtggcccttagaaattcagaatactagcaggagaggcgcggcaactgctactgcggaggagaggaggaagaggaggagccccaccgcgcgtgcgccgccgccaccaacttcgtccacttccaa

SEQ ID NO: 41270 - DNA, 59 bp, Oryza sativa
  Clone ID: uC-osroM202036a01a1
tcgcatcggaatgcggccgaggcggttatcagcttcacttcaaagggccggtaattacg

SEQ ID NO: 41271 - DNA, 105 bp, Oryza sativa
  Clone ID: uC-osroM202036a02a1
gccacttttagtttgggccggccttcctttttttttggggttggttttttaaaaatgtttttttgtttttttttttttttttttttttttttttttttttttttt

SEQ ID NO: 41272 - DNA, 355 bp, Oryza sativa
  unsure (1)..(355): unsure at all n locations
  Clone ID: uC-osroM202036a03a1
acgttacagtcaagggtatggcatctttnagtgggccggcccttcttttttttttttttttcgcgtaagaaagaattgcattacttttggggtatgcgatactataagcaacagagtatttgtaccagtctaaaagcagccttcttttactcttgccacataaacatattcagtttaactacacttttagcaccctgtgtggatgtcatgtgatgagaggcaggaccgactgacttgttcactcacgggattattaaagctgccaggctctttgaagctatctcgtacacattctctgatagcccattggctgacacgatcatctccagctgagccttagcaagagcttgtctgc

SEQ ID NO: 41273 - DNA, 293 bp, Oryza sativa
  Clone ID: uC-osroM202036a04a1
aagcgaagacaattggccataaatgcgttttatatcatatatggactaacaaagatcacaacaaaggttccaatggtaaatatccatgatatatccaccctgggctgatccttacattaaaagaatggagatagctatggacctagttatgcaaattaagcgtagcacattgaccataaaatttaacaacagtgcctccgatcatacaagcgactaagcaggaagcaggaaccaaatattaccgaaaatttgaagcatttgacatctaagcagtacgcggcgaacttgaacca

SEQ ID NO: 41274 - DNA, 188 bp, Oryza sativa
  Clone ID: uC-osroM202036a05a1
ggcggaatctggttcttctgtatttatcaatcaatcatcctatgtaagactgtaacgagaatgaacacaacttttgggctacaagatcaaaccaaaacgtgacagtacaagcgtgccatgggcgaaggcatattgtcgagtactttacaaggacggcaagagatcaccggaggcaagcaaaacacccc

SEQ ID NO: 41275 - DNA, 155 bp, Oryza sativa
  Clone ID: uC-osroM202036a06a1
cggccggcctggtggagagggggagtattgtagtggaacagtgtacatagatgatgattgtagaagccatggtagtagggctcggcgaagttggggggtaagaacaccgaaccgaagaggaacaataaaaggggggcaagggcgaaggcaaaaag

SEQ ID NO: 41276 - DNA, 309 bp, Oryza sativa
  Clone ID: uC-osroM202036a07a1
ttgttttgcccaacatatgtagtaactctatacatatataaatctgtacagcattataatacaagattatgatcactcacaactgcatgcagggggcaccacaaataagagaagacggagcagtgcctttcttcttcgaacatgtacaggaaattcactaggaacatcagtgatcacagttaaaacaccattcctctaataatcatcacatcagcattcgcagttagacgagctgctcccgaagcagctgttcttgggcgccatcttcctgacgctgacctgcaggaactggagcgtgctgggcgagat

SEQ ID NO: 41277 - DNA, 464 bp, Oryza sativa
  Clone ID: uC-osroM202036a09b1
tgtgttacccctgttgccagcacctaagcctactctgcagaagcctgttggagcttcctcatacattcaatacaacaatagaggccgaggaagaggaagaggccgaggaagaggaattgggcaatcacgtcctataaccaagtttacagaggacttcgatttcatggcaatgaatgagaagtttaacaaagatgaagtatggggccatctcggtaaaagcaaaggacagttgaacgatgatcctaatgagtatgaagatgatgttctagaagatgatatttctcctgggaagccagaagttaagcctgtatatgtcaaagatgacttctttgattcactgtcatgcaataccattgataatggaggggggaatggaagaatcaaattctcggagcagagaaaaatagacacagagacttttggtgattctgcaaggcatcggcccatgggcatgcgtggaggaa

SEQ ID NO: 41278 - DNA, 115 bp, Oryza sativa
  Clone ID: uC-osroM202036a10a1
ttgttggttattagcaaaaccgcattacgagatttaatccatagggttcaacagagttaaggtagggacagccagaagggtagacacaaatatgatagattcaacaggtggctgt

SEQ ID NO: 41279 - DNA, 260 bp, Oryza sativa
  Clone ID: uC-osroM202036a11a1
gatgcacgcacgcgtacgctaggtagccactctatttggggcggcccgccctttttttttggggggaatctggtcgctaccggcacaaaatcaatacaatcaatctatgtaagcactgcaccgaggaacggacacaacgcatgggccacaagatcaaaccaaaacgtgacagtacaagcgcagccatgggacgaaggcaaaaggtcgagaacttgacaaggacggcgagagaacaccagagcaagcaaaacaccccaaaa

SEQ ID NO: 41280 - DNA, 267 bp, Oryza sativa
  Clone ID: uC-osroM202036a12a1
ggcttggggagagcggttgtattgtattggaacagtggccacagatgctgcttgcagaagccatggtagtagcgctcggcgatgtcggggggcaggaacgccggcacgcagttgtacgactcgaggagcgcctgcgcgacggcgtcctggtcggccagcgggatgtcgccgaggaggcagacgatgtagatgaactccatggaagaggaggaggacgagtgctggagggggcggagggggggagtcctcgtaaaaggagaaggtcca

SEQ ID NO: 41281 - DNA, 283 bp, Oryza sativa
  Clone ID: uC-osroM202036a12b1
catagctcagctcggagaagcgaagaggaggaagaagagcaagacgccgatggttacgcgtgtgtgctagtggctgagcactagcggcggcggcggcggcgacggcgacgacgacctcacccacggcggcgacacatgttgagtgaacaaacggcggctagtggtagcagcagcagcagccgcggcgccgacgaccgggagattgtcatcagcaccggccgggagatcgtcgttagaagcagcgggggtgaggagagggaggaggaagtccctctcttttctc

SEQ ID NO: 41282 - DNA, 311 bp, Oryza sativa
  Clone ID: uC-osroM202036b01a1
gggggtgattcttgtactttgagctgcacattaaaaggtcacggagaataagttacctcccaaataaacacgctacaaaaataaggcccagaaattgcttggagaaattctcggggactgacagacaaaagccggacccagagcgacaggactattttaagaggaaaagctgggattcaactgagccttttaactagtagggggaacacaccaacttaaaacaccctgataggtttcccaatggtgctcttgaagaaaagggacgtaacattcggccaggacttttaaaaaagggacacgaggaaggtgac

SEQ ID NO: 41283 - DNA, 445 bp, Oryza sativa
  Clone ID: uC-osroM202036b01b1
ctttatatgcgccgtttcgctccctgacccttcggcggcgtctttgccgatcattatgagtaagttgcagagcgaggttcttaaggaagccatcttccaggttgttggggaatccaaggtgaagggcaggaagttcaccgagaccgttgagcttcagattggtctcaagaactatgacccgcaaaaggacaagcgtttcagctgctccgtcaagctgtcccatatcccctgccccaagatgaaggtctgcatgcttggtgatgcccagcatgtcgaggaggctgagaagattgggcttgactacatggatgttgaggctcttaagaaaatgaacaagaacaagaagctggtttagaagtttgccaagaagtaccatgcttttttagcatcagaggccattaataagcagatttctcgtcttcttggtccttggtttcacaaggca

SEQ ID NO: 41284 - DNA, 284 bp, Oryza sativa
  Clone ID: uC-osroM202036b02a1
ccacattagaagcttacgtagaataagttactcccaaataaacacgctacaaaaataaggcccagatatttctttgatatattctcttgcactgacagacaaaagccggtcccagagcgacaggtctattttaagaggaaaagcttggtttcaactgatccttttcacttttaggtggaacacaccaacttagaacaccctgattggtttccccatggtgctcttgatgaaagggcacctcacattctgccagtcctttttcaaaagggacacgaggaaattga

SEQ ID NO: 41285 - DNA, 413 bp, Oryza sativa
  unsure (1)..(413): unsure at all n locations
  Clone ID: uC-osroM202036b03a1
gcaggggaaataccataagtaatagacgattccccatttaaatatagaattgtccggaaaacttaaaactttaggtcagaataatttccgagaatncccttcccaattggngtcggttcacttaaatttaattgggtttaaccaaaattnacgattnttttttctttggtcaaataaatttgcngcaacacccaaaaagattgcacatccagaaagatagcacattggatacatcaaagtaaaaaaagccacagtacgccgtggtgtttcaattacacttcataacatgacaccaactaagcatagagagcctacagaggagggagaggaagagggcaaatacgagtagctagctaagctagtttgtgcgcttgctggggctggatggcatgtggcccttcccttctgggcct

SEQ ID NO: 41286 - DNA, 429 bp, Oryza sativa
  Clone ID: uC-osroM202036b03b1
ccttcacaaggaactcaagttgagatcacaacaatggccacattgctattgtcaagcaacaagaagccctgcatctcgtcgtcgttgctgctgcttgtgctcctcctcctgctcgtcttcttcgcacaccacggcagttgcagcaggcctctgcctcttccgtcgccgacgccgatgcagccacagctgaagcacgaatcggagacagcatcagcagatacgacgacgacgactgaagaacaagtgatgcagcagcagctgtcttggttgagaagcatgaagcccagagggaggccacagccatccagccccagcaagcgcacaaactagcttagctagctactcgtatttgccctcttcctctccctcctctgtaggctctctatcttagttgtgtatgtatgagtgtatgacacacgctacttgttt

SEQ ID NO: 41287 - DNA, 62 bp, Oryza sativa
  Clone ID: uC-osroM202036b04a1
ccgcaatcatgcgaattattcacagaatacaccaaagtatggtgtacactgcttgctccaaa

SEQ ID NO: 41288 - DNA, 477 bp, Oryza sativa
  Clone ID: uC-osroM202036b04b1
gtctcttttcaccacccgccgctcgccgctcgcccaccatggccatggcgacggcgctccgcaagctctcctccgacgccctccgccgccagccgctctcccgcatcaccccgctctactacatggcgtccctgccggcgacggaggagagatccggagtcacctggccgaagcagctgaacgcgccgctggaggaggtggatcccgagatcgccgacatcatcgagcacgagaaggcccgccaatggaagggtctggagctcatcccgtcggagaacttcacctcggtgtcagtgatgcaggcggcgggatccgtcatgaccaacaagtacagcgaggggtaccccggcgcgagatactacggtggaaacgaatacattgatatggccgagtcattgtgccagaaacgtgctttggaggcctttcgcttggacccagcgaaatggggagtgaatgtgcaacctttatcaaggtcac

SEQ ID NO: 41289 - DNA, 171 bp, Oryza sativa
  Clone ID: uC-osroM202036b05a1
atgcacgcacacgtacgctagggatccactttttcgaccgcccttccttttttttttttttggacaaaaatgacagattaattccattatattattgggggagcattacagaaccaaacaattcataccaaattacataatttgcattatttgtatgtggagagattgatg

SEQ ID NO: 41290 - DNA, 249 bp, Oryza sativa
  Clone ID: uC-osroM202036b06a1
tgcagcgacggcgatgttattctcatggtactgatagtgcgggcgcgacggcggtggctgcgggtggtggcggtgcctgccgccgtcgctgacgcgataccggcggtggtaatttccactggcgctagcgtcgttaaccgacgccattcttctagaggtgccaccggcgccggcggtggcaccaggcggcgcggcggcgttggcggtagaggaggagaggtccttcacctgcgagagctccatgtgcgt

SEQ ID NO: 41291 - DNA, 137 bp, Oryza sativa
  Clone ID: uC-osroM202036b07a1
gtggagggtgacacccctgtactttgagctgccgcgggagaagccggtgctctgtcgccggagaacgtgcacgaactcctacttggacaagctcttcatctgcctcatgtcctcctcgtagatcgctcaggtatgaa

SEQ ID NO: 41292 - DNA, 306 bp, Oryza sativa
  Clone ID: uC-osroM202036b08a1
gctcgaaataagaagtttgaacttttatatcgaagacttctacttaaaactcctatgatgattaaatcatggccgggtcgcagagttcttctatgccaaaagagcaagtagaactatcctaaaggtacccaccacaagtggggcatgcgctttggaccatacaaacaagactgcttattcactacagtatatagctgggaataaaaaagcaggtgcagatctgtgggtaatccggagtaggacatttgaatgggtgacatgctgtgttggttacccattgctacaggttcctcccatgacagggca

SEQ ID NO: 41293 - DNA, 394 bp, Oryza sativa
  Clone ID: uC-osroM202036b08b1
tgtataaactacaagcagctcacctcgcaaattaactgtcggccatggcggctgctggtgaagcttcaggaggcagggacaagtaccggtcgttcatgtacggcgagggagagaaggacaccgtgtggaggcttggatcccctccaaactacgacgtcgtcaacaagctcttcgaggaagagagaaccaaggaatggccagaggggtctctggaggagaaggtccagaggttgctgaagacctgggagatggagctcatccacaaggtgcgacccgaggaccagaagagcgtccactcgcagaaattctgcgcgagcaccaacgggatgagatttctgagccggaaggaggtgatggctatcggcggctacaacgcgtttctgcagacgaaact

SEQ ID NO: 41294 - DNA, 66 bp, Oryza sativa
  Clone ID: uC-osroM202036b09a1
tttgtttttgttttttttaaactttattttttgacaaaacagattcaacaaaatgcgcaaataaca

SEQ ID NO: 41295 - DNA, 211 bp, Oryza sativa
  Clone ID: uC-osroM202036b10a1
aaaacaccaggaaccggggtttatttgggggaagcactgcccaaaatctcgcaaaaggactgaaaccttaaacaaagtacacatccatggaaaacatggatgccaaatgacaactacagaaaattatcaaattcgaatgcagctgacgggttttcctgctgaaaatgcatattttcccctccattacttggatgggctctttccatcgaca

SEQ ID NO: 41296 - DNA, 222 bp, Oryza sativa
  unsure (1)..(222): unsure at all n locations
  Clone ID: uC-osroM202036b11a1
gaggaaaatgacaaaaacgagctctcatattattggggttgcattccgctgtgatacacttttaatcgaattacaaatttgatacacttcactggaaagaattgcaaacaataggcttaaaaaccgtaaagctatccaaactagtatacaacagagtaacctactaaattaaacaagggtgctcaaactgtccaaaaagnacttgttgncttccaagaattg

SEQ ID NO: 41297 - DNA, 128 bp, Oryza sativa
  Clone ID: uC-osroM202036b12a1
ggagaccaccaccaccacgcacctcacgccgccgccgcagacgttctggatcacgctcggccccggcgccgggatggtcaggttcaggttgtcgccgagcgtcctcggcgttacggctggctccgccg

SEQ ID NO: 41298 - DNA, 455 bp, Oryza sativa
  Clone ID: uC-osroM202036c01b1
accatgttcctccgcgtcccgccgccggaccgcgcgggccgcaagccgccgccggctccaccacacgtgctgtgccgccttcagcgcgttcctcctcctggtcctcctcgccgccggcccgtggcccgcgttccaccaggcgcccaggaacgtgatggtgttctcgacggcgttgaccggaggaggcgtgagcttcacggaggagtagaggaagcggctcgatcggcgcggtgcccctgaaaatctcactagcaagcacagatcaatctcatcacttctttcttctcttagatggcctggttgactgcgaaggtcctgctgcagatggcacctcttgagcagcctcaactgcttcagctttagagcttttcaaactcctccttgtcatccctcgctgatgggcctgctctttcattttttttaaccaggttagatttgactcctctgcgtctagt

SEQ ID NO: 41299 - DNA, 315 bp, Oryza sativa
  Clone ID: uC-osroM202036c03a1
ggttcattctttgatgggaaaaacaaagggaaccataaagatactaaaaattcaatccaggagttacataatgcataataaaataatacttgaagaagcaactagaaacttaaccctgggtcacaagccataacatagggagtcacaagtaacaaggttttatgacccattaatttcatcaaaactaataatgactaaatgatatcatcgagatctgaatcatccaaaactctatttggaaactcataatagactactaacagaaaaaggaatgtggatataccgagtacatatagggaaacatgacgtgcacct

SEQ ID NO: 41300 - DNA, 250 bp, Oryza sativa
  Clone ID: uC-osroM202036c04a1
tcgcggtgaaccataatagcataggggtaatccaccgggccgaggatggtgaactttgggttgccttctgtttctgtgaaagacaatggttgtgcaaaaggtgggaagtggagaaggtgaggccattccgattaggggacagagtacggatacgacctgcctgtaccccacgttggggagggggaggagacaagaagaaagtgggcgaggcaagtgcaaagggaaacgagaccagtcaaaggaggagggc

SEQ ID NO: 41301 - DNA, 342 bp, Oryza sativa
  Clone ID: uC-osroM202036c04b1
gtaaagatccaaggacactattaattaaattaatgttcaggtccaaacctgtacacgggtaatatgatacaaaaggagttaggcccataattatacatgtaaaaaacctaggtggtggttatcatgtctatttcaaagttctttttcagcctttatttcgttcttttccccctgctttatcaacacgaaatacaacccgccatgcctatgcgatggtgcctatgtgcaacttgcaactccattgcatgattgggaccttactaaatttgaaatactgcacaatggaagggagcaagaaattaggtaaatggggttaaaagaattccgtgagactatgaacaa

SEQ ID NO: 41302 - DNA, 301 bp, Oryza sativa
  Clone ID: uC-osroM202036c06a1
aaatacttaatagtaatagactctttgatggagtattacaacatgcagcagtggcattaatacgccagtacattaattaagtaacacatatgcaggctccattttggtttcttttaatttatcgtattacagaatttctgtagccttgctgatgatcacttggatatcatgcactagtaattaacaataggatgcatacaaaagatggcccaacgacaacagaagatgcgtgcatctgacattgtctggccttattgggttgggagaactccaattaattaacaagagatgatgcattctt

SEQ ID NO: 41303 - DNA, 264 bp, Oryza sativa
  Clone ID: uC-osroM202036c08a1
cagagtgaatccaaaccaccaaccgacataatgataatatgaattcactgatacaatgaagcctgaagctgaaagcagaggggtaagggtgcacatcagttaacgtgtgatgtagtaacaatttacatgacaggcagtttggcagaaattttgaaacaaaattcaagtggtttggattagctgtatttccaaaacaactgaactgagctgggcagctggatgctgcattgcaccctggaatcttactttcccttattagtgaat

SEQ ID NO: 41304 - DNA, 263 bp, Oryza sativa
  Clone ID: uC-osroM202036c09a1
ggtacagccgatgatggggcagaagaaggatccgttcggttcaatagaccccttcgctgcgaagcccggatgtatgaatgctgcaaagaaggctaattcccgtcaagccggatcaaggttttggggcgttacaaggcgtgaattcaggaggcattgcaggattatcgggcttccagaccgctgacagtggatttggtagcttccagagttccggtgcctgggaaaccttccactttactaccactggcaccagattccagcgc

SEQ ID NO: 41305 - DNA, 363 bp, Oryza sativa
  Clone ID: uC-osroM202036c09b1
tgttttttttttttttttaattcttaaagcaagcttgatacattatatgattatacaaataaaagaatatactgtaggtaaagatgtaatcccacggtttataacaacacattggcaaattattcccccaaaggcacaagtatagtaaatcaattcaaaataactcacagttctcgtgtcaaggtggattacagtggttgtacacaatgcactagcaaaacacctttagtcagccatcttgttcaggcgatggatcatactcctcgcaagcctattccctgggtcaatttttagaaccaaacggaggtcctctgtaccaagcctgtattttttagagcttttatatagaagggcacgttggac

SEQ ID NO: 41306 - DNA, 106 bp, Oryza sativa
  Clone ID: uC-osroM202036c10a1
gggtaaaaagaacgtttactggaaaaaaaggaaaaaggatgggctgttaaaaaaagtccaaatccaaaaccaattttacttgttaaaaacactttggaatatccaa

SEQ ID NO: 41307 - DNA, 331 bp, Oryza sativa
  unsure (1)..(331): unsure at all n locations
  Clone ID: uC-osroM202036c11a1
tnttttttngagcaaaattcataggacaaaatgtgcttcagacttcatgatcaggtagaaaagacctgcagtaacaagtgaccgggactgcaaaagtcagaagaacggggaagaactttcactctggaaagacaacaccttccactacttactctgaaaactgtaaacttatgtaccgaaccaaagagtagacatatatgcagctcaatatatacaccaaatgaacatccccaaccttattcgtctagttacatatccgacgcacccagccccggactaacaggagtagtgcgttttgtgaattgtcctctttagcttgtcaaggatacca

SEQ ID NO: 41308 - DNA, 197 bp, Oryza sativa
  Clone ID: uC-osroM202036d01a1
aaggatggaatcgagtagcaatactttgaccccaaaatacagcttagcgacaatatcttaaaaaagccgattggtttgccgccatggctggcaagctgagcagagcatctaacacaaagaacacgagatcactataaaccaaacggcaacgaacgaagaaaatacagggttcttttattggcctgaagattacaacg

SEQ ID NO: 41309 - DNA, 306 bp, Oryza sativa
  Clone ID: uC-osroM202036d03a1
gtaaaacaaaataatttactttagttcccccaacttatacaaatttacagcaccaaaagtttcagaaagctgcctgccaggccatgcggaactgcgggttatggcaaccgcagaagctgaaacagcaacagtaacatcaagttaactacaaagaaccgtaaaatagtgatcatcaccatgttcatctagacatagtagaaaacattcacactctcgaaatgctgtctatctttcagttttgtgttgctatacgtcttcttgttttgcattttttttagtattccatttctgttcagcagagtggca

SEQ ID NO: 41310 - DNA, 311 bp, Oryza sativa
  Clone ID: uC-osroM202036d04a1
tttttttttttttttttttttttttttttttttcatttttttttttttttttttttttttttttttttttttttttttttttttttggtttttttttttttttttttttaataaaggggttcccttaaaacaatcagacaaaaacccccattggaaaggggggcaacattcccaaagatgggacaaatccccaagggcccggcatttttggggggtttcccaaaagaccccaaaaccatttaacctaaggacaaaaaaaaaggggactgggcaaaagggtgaccaggctttttggcacaaatgcaatatgg

SEQ ID NO: 41311 - DNA, 181 bp, Oryza sativa
  Clone ID: uC-osroM202036d04b1
ggagtagtaaaaatgcaattcaccagatcgtccggtgaatggatcaaccggagcgacacggattgctggggaggacgatgactaggatgtcttggtcgcaataagcctgttctaggttttaagatgatggaggtcttggcgatcatggaggtgactatgtatgggtccatgttggactcct

SEQ ID NO: 41312 - DNA, 211 bp, Oryza sativa
  Clone ID: uC-osroM202036d05a1
gagatgaaatcctgcaatcctttctctgccactgttccacaaatttgaagttacagagctgtttgtgtcacaggtacacctagaaggaaatctcactcggcgcatggaatgtccgtccgcggcaaatggcttccaagttttctccagcataggagctaagtggagaaacttccacacctggcatgaacaatgggacagacatggcgtcaag

SEQ ID NO: 41313 - DNA, 483 bp, Oryza sativa
  Clone ID: uC-osroM202036d05b1
catttatctctcgttccagatttattatcttcacctcgtcgacccgatgcctacgcagccatttccctggtccggcgacaagccttcctcgtagatcgagatccccaaacctacctgtgtaggcggagaggagggcgatttctgtcgtcatcgctggattccactcgccgtctccgtcgccctgattccactcactcgccaccgcactttttctggagccacttcgtccatttgagcgagagcctggatctttcaaggattgatcggatcatccggcgctcccttggatcacaaggattcactttgcccaccgtcgagccggtgccggagtccagcgtgtccaaggtggaggagaggttgccggaggacaaagaacggtggtggaagaaggggctgaaggccatttcggaggggaagctagccggcgttctttaagccggtggtcaggggactcggcttggtagctctgatcctaaaggatgt

SEQ ID NO: 41314 - DNA, 330 bp, Oryza sativa
  unsure (1)..(330): unsure at all n locations
  Clone ID: uC-osroM202036d06a1
atcaggaaggttcacctttatcacgtacgnaggaatttcgaacacggagacctggtcccgagaatatttctttgccaaggctaaaatagaacggggcgccatctcaggccttggaaaacataaacatgttatgtagcatgcatatatacccacatcgccggataaatacgctagttaaaagctacggtcttcttctctcggcgtatgcgtccacctcgtcattaggaacgtgacaacaacacgtttaggccgacttcgcgaagccaaccctcatcttgccgtagtcgaacacggtatggtaggcacccatgaaaacgtcacccaggatcc

SEQ ID NO: 41315 - DNA, 534 bp, Oryza sativa
  Clone ID: uC-osroM202036d07b1
aatccatccatggcgatctccaagctccagctcgccctcctcgccgccgcaatggcggcggcggcgatctcccccaccgcctccggcgcctacaccggctgcgcgacgccgaggaaggtgacgatccagaacctctccggccgcgacctgcccctctccgagacgccgctggcgaacagcggcgcgctgttcggcgccggctacgtgctccgccacggcacgcacgccgagttcacgacgtgcctgtggacggggcgcgtggcggcgccgggggcggcggtggtggagttccacgtcggccccgacggcggcgcgtggtaccaggtggacaaccgccaggccgggtcgccggtgaaggtcaccgtgacgccgcacggccggccgctccagggccactgccccgccgccgggtgccgcggcggcggccagtgcttcgccgacgccgttcccggcggcaactgccacgccgtcgacgagctcaagatcatctactacagcccgtgattttggtttttgtttggttaaatttcggtt

SEQ ID NO: 41316 - DNA, 471 bp, Oryza sativa
  Clone ID: uC-osroM202036d08b1
tacatcttcagcttcctgccggcgcagcgcgaccgcaacacggtctcgctcgtctgcaaggtgtggtacgagatcgagaggctgagccgccgcggcgtcttcgtgggcaactgctacgccgtgcgcgccggccgcgtcgccgcgcggttccccaacgtgcgggcgctcacggtgaaggggaagccccacttcgccgacttcaacctcgtgccccccgactggggcggctacgcggggccgtggatcgaggcggccgcgaggggatgccacggcctggaggagctcaggatgaagcggatggtggtgtccgacgagagcctcgagctgctggctcgctcgttcccgcggttcagggctcttgttcttatcagctgcgaggggttcagcactgacgggctagccgccgtcgcgagccattgcaagcttctgagggagttggatttgcaggaaaatgaagtggaggatcgaggg

SEQ ID NO: 41317 - DNA, 302 bp, Oryza sativa
  Clone ID: uC-osroM202036d09a1
ccgccaaacgcaaattgtatattaaaatcatgggatatatcacaagatgattgctaaagaaaggggagacgaggaaaaatgaagttccattggcaccaaagccagtcaccacagcgacgacgaaccccggattatgtacattgtcaaagttgcaaaaccatgagctcctccgccggtcgccggagcagcagcaccgaccggtgaccggcgaccatcctgagtcgtcatcactcgtcgctgtgctgctgcgcgtgcgagctgctgccggaagtcaacgccggcgacggctggaagaggatgct

SEQ ID NO: 41318 - DNA, 331 bp, Oryza sativa
  Clone ID: uC-osroM202036d10a1
tttttggaaaatcaacgtgcatataatatccattcaacagaatcgcatctattacaagaccttccattataggacgccgatagtgcagagctgcataagacaatttacactgtccacatgcgttgacattactacagacagtaagactcaaaacgacaacacgcatacattacgggacagagcacaaatataaaaaggttacgtttattcgccttaatttatcttaagatggtaggattatataatatatggcaaacacaaacggtgactgggcaaaccattgaacctataccctgacgagaattcaacagggagaaaccacaccacgttc

SEQ ID NO: 41319 - DNA, 332 bp, Oryza sativa
  Clone ID: uC-osroM202036d11a1
tttttgtacgagtaattaacctttattacaaagtacatactaattctatccgatatgcatgcatgcagcagatcgatcgatttctatacacaaaactcttatactatatagcagcacacagctccaatcatatacacacacagatgaggacacacaatataatcacacacaatataagcagctagggtaggtaacaacaaattaaagaacaagctggagagaagaagaaaacaaaaacggccgtacgagtggaagcaaaacctcgcgtcttctcaactcataagtcatcaccgacaccaacctttcttgatttcctccatcttggacagcga

SEQ ID NO: 41320 - DNA, 450 bp, Oryza sativa
  Clone ID: uC-osroM202036d11b1
tttcttccctcttgtgctcctccttatcttctatctcttcttcttcccctatcttttcttctaaagaacatctgcaatctccagcttcttctgttctgaagcagtggctttttgtggtttatgcacaccattggcagctgctactgtttgctgcttgtgttgtcagaagctaccttattgtttcggtcatcatcggcgccatgtcgacgccgacggtgcagatggtggcgccggcggcggcggtggtggaggacccgagcaagcactggacgcggcacgggccggtgctgacggcgtgcctcgtcgggatcaacctgctcatggtcctcctcgtgttcttctacttctggcggttcttctccgggaagcgtggcccgccgacgtcgtcaacgtcaacgatggccagcggcggcgacgacgacgaggaggggggggcttcttctttctcac

SEQ ID NO: 41321 - DNA, 125 bp, Oryza sativa
  Clone ID: uC-osroM202036d12a1
atttttgctttatgggtaatattattttttccgtggatggttgtaactttggttttgtctttttgttttttgtgaatatttatttgttttgtttcttaaggtggtttgttttttaatttgtggcc

SEQ ID NO: 41322 - DNA, 246 bp, Oryza sativa
  Clone ID: uC-osroM202036e01a1
caggtaatacttgattggagtaccaacgaaaggattaacttcagccacaggattccaagtacaaaatagaaagaaaacgtcggcatatgctgtagcgaacgagaaaccacctcctagatgatcttaggtactgataacggagtcaatgctaaacaacaaaactccaaaagtttagaggattgtctctacttaaataattccgggcgcctcaaaactgtggccttctctgtcaatctgaccgagctg

SEQ ID NO: 41323 - DNA, 247 bp, Oryza sativa
  Clone ID: uC-osroM202036e02b1
gacgttcgaaccgccactttggattccccactatggacgccggcggcggaggccacggcggcgccatggcggtgtcggcggcggcggcggtgatggactaggcggacgccgtctttttcttccgccgcgggaaccggtgctgctgcttctgggggccgtgggcgttgtcgtcgtactcccgcgccggtggccttgttgtggcagtggaggaggagtggtggtacctcgtttggggagggggagggga

SEQ ID NO: 41324 - DNA, 119 bp, Oryza sativa
  Clone ID: uC-osroM202036e05a1
gaaagtaaacaaacttaaaatgcataatcatcactagaacagaatgcgtgggtgatactgacggtgacagggaaacagcagaagggaagggatgctgcggtgaccccatatcgttggaa

SEQ ID NO: 41325 - DNA, 516 bp, Oryza sativa
  Clone ID: uC-osroM202036e05b1
gtttgtagccggaaggacgccgtcatcgacttctgcctgggctcccgcaccctctcctccacccctatccgcttctggaccatgcatgtggtggataattgtactgtacagttaatacaaaaaagccatggagaagatgttgtagtcagagacttggaaactccgttatctcttcagccctgcccaccagcggttattcttgttgcaagtgcaggacaggatgctgaccatattactgcgatggagctccttagtgaagtgaaatctgctggtaagctggctgcatcaatatttttgaagcccttttgttttgagggacagagacgacaattagagttattgaagctgattcactgcttgagacagaagtggaaacccttgctgaagctctggaaagtgccaacaacgctgttctgtcaactattagcatgatatctatcatgatgggttaaatcagacgttccggagttcgattaatgctcaaattatggaagtccattctgatgaactaggaca

SEQ ID NO: 41326 - DNA, 252 bp, Oryza sativa
  Clone ID: uC-osroM202036e06a1
aaacgcacgatcgtacgattactaacactggatgaaaggtaacactttggcaacaatagtacattacaaaggtagctaaatgcgaagccacaaaaccgagagcccaagacgaccaaaaataaagtttacacaacatagcacaacatgcaaaccattcggactgaccctacatgagggcacttgaaacggccggggagggccttgcatcacaaatgccgaacaactagattgtgagcagcccacactgaaagg

SEQ ID NO: 41327 - DNA, 455 bp, Oryza sativa
  Clone ID: uC-osroM202036e07b1
ggcagcaaatcctgaaccatcatattcgcttgcacagccaaatacaaacgacaatagagatgaagtcactgacaggataacactatcgctagaacagtacatgcattttgaatgcaattctgatcaggcaaattattcaaaattcaatagccacatgtgattgctggcatcattttttcctgagctttgtcttcatcctctcaaccgcggctctcagcgtctcatcatccttgcaaaaggtgaacctcaccaagttcttcccatcctcagggttgagataaaatacactaggtggtatggcgacaacaccgacttcgcgaatcaaatactcgcagaactcaatatcattgtcgaaaccaaatggggtgtggtcgaccatgacgaagtatgttccacttgaaggatagacaatgaaacctgcatccttgagtccgttgactagcaatgccttctta

SEQ ID NO: 41328 - DNA, 79 bp, Oryza sativa
  Clone ID: uC-osroM202036e10a1
ttttgggtttttttcaaaccagaggaggccaacaatggcttgggataaccgcatatgaaaatactcgactccatgcaga

SEQ ID NO: 41329 - DNA, 497 bp, Oryza sativa
  Clone ID: uC-osroM202036e11b1
ctccctcccgtcgccgcggcggcggaggtgcctgcgggagatggggatggggatgggggcatcgccctggggaactggttcgccagggtcctcgacatggagctccagaagctcaacgacttctacatcgagagggaggagtggtacgtcatccgccttcaggtgctcaaagaaagaattgaacgtgtcaaagctaacaagaatggggcttttacatctaacagcgaattcactgaagagatgttagagatactcaaagcttttgtcatcatccatggggagatgattcttttgcaaacctatagctccctaaattttgccggacttgtgaagatacctgtaaaaatatgacaagagaacaggtggtttgctcagcctacctttcactcaacgtgctctacaccaaccatttttcacaacggaacctttaacaaggcttgttcgagaatgttagagtaatcttgagctactgttttctatttgaacaaacagacttg

SEQ ID NO: 41330 - DNA, 271 bp, Oryza sativa
  Clone ID: uC-osroM202036e12a1
aaaaaataagagccttttttatatcagagacatgtccctacgttcttacacgaagcaagacaggtaatagcataacagcagtactatgtttttcatgagggtaaaattttaccagacctactaaagcaccagttaattcaaaaaagacactacataaaaaataagagccttttctatataagggacatgaccctacgttattacacgaagcaagacagcttatagcataacagcagaaatatgttatacacgcggttagatagctaccagg

SEQ ID NO: 41331 - DNA, 234 bp, Oryza sativa
  Clone ID: uC-osroM202036f01a1
gggaagccacttcagtaattaatcttgccaaaaagaactaaagaaggatatgaaagaagaaactcacttaagttttgaatattttttttacaaccatgatcgattaattttttagaagcaaaaatcactgcaaccgatcagaactttttgactttggggtaattttttttgaaacttgtcaagaccaggagcttgatgacttgaacggggagaccttccggggtttgctgccca

SEQ ID NO: 41332 - DNA, 245 bp, Oryza sativa
  Clone ID: uC-osroM202036f03a1
gaaaacggtagtagaaaaggtagaaaagcagtaagaactctagatgtacgcaagtcgcaccataccatgtacaccttgtgacctcaccctgcctatcaacagggcacccgaccaaactaactcaatccatgaataaaaaggtccttttctctgaacacaagctagtagggttcatcattaacacaagctagtagggttcaacatcacaactaaacgcagcaggcaaaattgtttggttccttcac

SEQ ID NO: 41333 - DNA, 255 bp, Oryza sativa
  Clone ID: uC-osroM202036f04a1
agtagttcccgaaccttaccaaacaaatgaacaattcgatattaactacatcgatgatcgatcggggttgaacgcatattcgtctatccgtcctgttagatgagtactactagtacaaagtgcatcgtacatacacaagtacgcgtatacatcacgactcacgtaacacggagcacgtacgcctacgcgggcacgggcgagcgtcacaacttgttgcactgcacgggcgcaaaggagagcgtgtcgtggccgacg

SEQ ID NO: 41334 - DNA, 298 bp, Oryza sativa
  Clone ID: uC-osroM202036f05a1
cattgctgctgctattgcacatcatcagaacattaacaggagtgcacactactacattcttctttccacttcttcttttttggaattttcctagacgtaaactctaggatgaacattaaacttacaaggcaacactgaacaaaggcttgcattttgttcatactttttttagggtcattttggtttatactatacaaaaggacacaactaaattcctagataaactctaggacaaacccagactttgagtagaccacaccagcagcacagccgggaggaaggaagcaaagaaaacacg

SEQ ID NO: 41335 - DNA, 307 bp, Oryza sativa
  Clone ID: uC-osroM202036f06a1
gattaggaaacactgaacaaactgcaactgcagctaggcactctggaatgttcacgcaactgaaaagaaaaaaagttaggacttgcctccaaaccatttaagatcactatgctccgagtctacccgcgaatctcacacctggctctttacaatatgatgttgaacgctccattgtacatatcaagcagagcagcatgccctctttgggtttcctgcagcgctgtcaatgctgatagttttaccctgggaaggcagcggagcaaaagcagcagctgcttctttggcggccagggctttcctgttaaca

SEQ ID NO: 41336 - DNA, 526 bp, Oryza sativa
  Clone ID: uC-osroM202036f06b1
cctagtcttcttctccgccactccatcggcaaggaggaagatctcggaggcggtgcccggaggaggtgaggcgagatgggcgggcgggtggatcacgagtactcgtacctgttcaagatggtgctgatcggcgacagcggcgtcggcaagtctaatatcctctcccgcttcacccgcaaccacttctccctcgactccaagtccaccatcggcgtcgagttcgccaccaaatccctgcagatggagggcaaaacaataaaggctcagatctgggacacagcaggacaggagagatatcgtgccatcacaagtgcttactaccgtggcgctgttggggctctccttgtttacgacatcacaaagaggcagagcttcgacaatgtccacaggtggcttcgtgagctccgcgaccatgccgactcgagcattgttatcatgatggtcggtaataagtctgatttgattcatctaagggctgtctccgaggatgaaggtaaggcattggctgaaaaggaggggctgtttt

SEQ ID NO: 41337 - DNA, 302 bp, Oryza sativa
  unsure (1)..(302): unsure at all n locations
  Clone ID: uC-osroM202036f07a1
agagttaactcttttttttatttattcacaagctacttgttacacaaacgatacatcgaatgcgatgtttcgaatactttttaagactaggcgtcatcgcttagaagcattttctgtggacgatcgaaggaccggattcgtcgtactcctctttcgagatccacatttgttggaatgtggagagcgacgctaagatcgagccaccgatccagaccgaatacttacgttcgggtggagcgatgatcttaatcttcatcgncgacggggctaaggccggttaactccttttgcatacggtcggc

SEQ ID NO: 41338 - DNA, 321 bp, Oryza sativa
  Clone ID: uC-osroM202036f08a1
ttttgtatattttcttagtacaagataccccatccaaaccggaagctctagggaatacttttcttaaaacaccatacacacatacagagcatggaaacttagtgagacataaagcactaccaaagacaaagcaacaggaagcgcgtttggaattacacagatgatccaggacctttaccctggcgcacatggtaaacaaattgtactaaaaggaagtgaaatgcacaggggcacactgaatagcttcccaagcaacaattatttgcgcattcatactggccactgattctgaagttccagttctattaacccaacttgacc

SEQ ID NO: 41339 - DNA, 424 bp, Oryza sativa
  Clone ID: uC-osroM202036f08b1
gtaacccccacctcctcgtcgcgggggggtcccgtctcggttgcggcggcggcggcggagtaggccacggtggtggtggtggtggtgagtattttctactatttttatttattatattttctattatatctttttttcttttatttattttacttttattatattttttttatttttttttatttttgtaatacttttttttttttattatctatctctaattatttatttatttttttatttaattatattattaattttactatttttatttaaatttttaatttatttttttttatattttatttttattttttattttctttttttattattatattttatatttttaatattcttatttatatatttttttttatttattttaattatttttttattttatttatacttatttattatt

SEQ ID NO: 41340 - DNA, 285 bp, Oryza sativa
  unsure (1)..(285): unsure at all n locations
  Clone ID: uC-osroM202036f10a1
gacaaaaatatgcacataaactgcagatgaaaaccatctggtcactttatacaagccgtacatcagctaaaagaagttacgatgcctcaggctcagcagacagaaatnaaaacgaccacagtaaaaacaaaacaaaacctacatgagacaaaaaaatcgagagatagtgtcccactaccaccaaagcaacattatttgcagaggttcctttttttcagcccacatacccgtggtctagttattattgaaaattcgtccgtcctcaaattcgatcgaatttaaatt

SEQ ID NO: 41341 - DNA, 533 bp, Oryza sativa
  unsure (1)..(533): unsure at all n locations
  Clone ID: uC-osroM202036f10b1
gagagagagagcagcagcaggtagcaggtcgaggagggtttgtggccatggcgatcctgtcggatgtggccaccgaggtgctgatcccgatcgccgccatcatcgggatcgggttctccatcgcgcagtgggtgctggtcgcccgggtcaagctggcgccgtcgcagccgggagcgtcgaggagcaaggacgggtacggcgactcgctgatcgaggaggaggaagggctcaacgaccacaacgtcgtcgccaagtgcgccgagatacagaacgccatcgctgaaggagcaacatcgttccttttcaccgaataccaatacgttggcgttttcatgtcgatattcgcggtggtgatcttcctcttcctcggctccgtcgagggattcagcacaaagacccacccctgcacatacagcaaggacaaggagtgtaagcctgctctgttcaatgccctgttcagcaccgtctncttcctgcttggagccatcacctcagtggtttctggctttctccggatgaagattgcgacttac

SEQ ID NO: 41342 - DNA, 367 bp, Oryza sativa
  Clone ID: uC-osroM202036f11a1
cgtagctgacctttgcggcgccttttttttttttttttttcagaggaaaattatacaaatccatggagacgagaaaacaaatcacatgacagctcgtaattacagaactaagtacacgatggaacggaacaacaaccccctattcatcactcaccatcccattcattctaggctcagtcttagccaaaaacccaactccattcttctccttcaccaccacattgccatgccgcgccgtcagaccgaaatgtattcaagaaacaagcaatcatatgcactgcctctatcctggcaggcgggcccgatcagaagagggccagcttgacgaggacgcccgcggcgggaccaacgcgcgctggcctgcggc

SEQ ID NO: 41343 - DNA, 531 bp, Oryza sativa
  Clone ID: uC-osroM202036f11b1
ttttagctagctaactaatcttccccttcgtctgcggcattattccacttggacgaacactagctcaccggccggccatggcgtcttcttccgttctgatcaagctgctcgtcgtcgtcggctgcgccgccgcggcctccgcggcgacgctcaccgtgggtggtagctccgggtggacgcttggccagaactacgatacttgggcaagtggccaaaccttcgcggttggagacaagctcgtgttcagcttcgttggggcgcacacggtgacggaggtgaacaagaacgattacgacaactgcgccgtcgcaagcaactcgatcagctcgaccagcaccagcccagccaccctcgacctcgccgccgccggcatgcactactacatctgcaccatcagcggccactgcgccggcggcatgaagctggccatcaacgtcggcagcggctccggctccggctccggctccgggacgccacccagcaccaccccaggaagcagcggcacgcccgccggccaccccttttttcccc

SEQ ID NO: 41344 - DNA, 300 bp, Oryza sativa
  Clone ID: uC-osroM202036f12a1
gccgaccgaccgaactccacggcgaccgtccgcgcagtcgctcctctactggggcaacggcggcattggcgccgccgccgcggcatggccggacctcgccaactgcggatcctccatagcgacgctcttctagctagcccagcctgccgcgcgcgccgcctacacgccgccgactgtgctagctagctagctagctcgtcgccgttcgccgtcgtcgctaactctattttttttccaccttaattttccctgagttaatttcccgatccttgataaaaataacatgtattgggggaaaaa

SEQ ID NO: 41345 - DNA, 240 bp, Oryza sativa
  unsure (1)..(240): unsure at all n locations
  Clone ID: uC-osroM202036g01a1
acggcgacacggtaaggctaaggcattcctactagcagtcggaccgcacnnctttcccttttttttttttggaatgctaaataagcactggtcaatgactaactacattgtcagaaaattgaaacagaccttctaaatgactaacaaaccggaagactggatcacaatgggatggctatggtcctaacctcaaatcaaaaaccggggctggccggcacttgaacccaaaagcaccgggag

SEQ ID NO: 41346 - DNA, 100 bp, Oryza sativa
  Clone ID: uC-osroM202036g02a1
ctacttgtagtttggcggcctttcttttttttttttctgttctacaaagaagcaagagctcattaacacggagtcaccgatttacaacccaaaagtagaa

SEQ ID NO: 41347 - DNA, 280 bp, Oryza sativa
  Clone ID: uC-osroM202036g03a1
gagaaaaaagaagaggagagaggaggaagagggagggtttttttttgggttaagagaagtaaaaaaagggaaaagggaaaaaggaaaaaagataataaaaagaaaaatttaaaggaaggaaaggagaagcaaaaatcaaaaaagaaaaaaaaggtcaaagaaagaaagtaaaaaaggcgaaaggaaaggaggaaaggggaggaaaggaagaggagaggagggaaagaaagaaaaggagaaaaagaaaaaggaaaagggaaggaaagaagaaaacagggga

SEQ ID NO: 41348 - DNA, 189 bp, Oryza sativa
  Clone ID: uC-osroM202036g04a1
actttattggccggccttcctttttttttttttgaaagacgggtgtaaatgaattgtattatgctcagtatatgatgatgttacaggaaacgaacagtcgtatcgtaagatacaacatcaattcgactatggtaagtcattacattctgctataccataagcacccaacccttcggggagaaactagat

SEQ ID NO: 41349 - DNA, 296 bp, Oryza sativa
  Clone ID: uC-osroM202036g05a1
ggagcccatgcaatccctccattcttattagattccacatcctccaaactacattttgtagtactactcccaaaatactactacaagagagcagaaaaacagagaggagggaatgcgcctcctaactcggatttacagatcaatgagaaactccacccttgaaactcagacttgttacatccaaaggaagagaacctagcatcttcaaccactatttagtcgaccgatcacgcaaattaagtacatgatatggcgttcctggtaattacctgggctccatgatcaataagtatgtt

SEQ ID NO: 41350 - DNA, 152 bp, Oryza sativa
  Clone ID: uC-osroM202036g06a1
gcaaacaatgcatgcacatcaaattatcgaggcttaatcaacaacacgacatgacaaaacacgacgcacattacgaggacatgtcgacatcaatgcatgcatgcatgcgatgacgtgacactgtcacacactgacacacttagctagctaaa

SEQ ID NO: 41351 - DNA, 442 bp, Oryza sativa
  Clone ID: uC-osroM202036g06b1
agtgttattccatccatggcgatctccaagctccagctggccctcctcgccgccgcaatggcggcggcggcgatctcccccaccgcctccggcgcctacaccggctgcgcgacgccgaggaaggtgacgatccagaacctctccggccgcgacctgcccctctccgagacgccgctggcgaacagcggcgcgctgttcggcgccggctacgtgctccgccacggcacgcacgccgagttcacgacgtgcctgtggacggggcgcgtggcggcgccgggggcggcggtggtggagttccacgtcggccccgacggcggcgcgtggtaccaggtggacaaccgccaggccgggtcgccggtgaaggtcaccgtgacgccgcacggccggtcgctccagggccactgccccgccgccgggtgccgcggcggcggccagtgcttcg

SEQ ID NO: 41352 - DNA, 299 bp, Oryza sativa
  Clone ID: uC-osroM202036g07a1
ccaaaaagccaaacggaaaagctacatgtttatttaggcttagactttttgacttataagttggcttataagcctaaacaaagagggccttaggatttagacgaaaagcccaaaccgaggcacactttttacgaataccaaaataatgacaattacctccaagcctcttgcaaatattacaaattatatggggatgtttctattccattaatctaagcccataggattcaaattagagcctactaaatattggatacacattttcattcttcaatgtacatatagtctcatgagattgt

SEQ ID NO: 41353 - DNA, 104 bp, Oryza sativa
  Clone ID: uC-osroM202036g08a1
acaatcacacaaacttaaattaacaacattggaataaaatcatcaagtagatcttgggacacacggtaggggacatcacataacaccaatccagctacacacaa

SEQ ID NO: 41354 - DNA, 462 bp, Oryza sativa
  Clone ID: uC-osroM202036g08b1
tatctcctaatcaccacaaaggcttaaaaatctccagtctccatagagagaaagagagagaagagaaggcagcttgatttggggcgaggagacgcgatagccgcgataggctaagcagctggcagcggcggctgctgcgatggccggcgccgacgtggacgtcgggacggagctccggctggggctgcccggaggtggcggcggcgccgccgaggcggcggccaaggccgcgaagaggggcttcgaggagaccattgacctgaagctgaagctgcccaccgccggcatggaggaggccgccgccggcaaggcggaggcgccggccgccgagaaggccaagaggccggcggaggccgtcgtcgtcgacgccgagaagtcacctgctcccaaggcgcaggcagtgggttggccaccagttcggtcgttccgcaggaacatcatgaccgtccagtcagtgaagag

SEQ ID NO: 41355 - DNA, 322 bp, Oryza sativa
  Clone ID: uC-osroM202036g09a1
atggggggtttttaaatgtggtggttttttatttaagttgtttttttaaaagaaaaccgcccaaagggaaaaccaaaggaaaaaggcgggaggaaggaaggaacaccaaaaaaccaaataaggggcacaagaccaaaaaagggccaaccaaaaaaaacagaggcaaccaaaaaaaataaacaccacacagccgaccgggggaacgaacgaaggaaccccaacccttttgggaaaggggccaccacaaaaaaagcaaaattaaagagggaacaaaaacgtacggacaggtcgggaacgaacgaacaggaacagccgaagaggg

SEQ ID NO: 41356 - DNA, 81 bp, Oryza sativa
  unsure (1)..(81): unsure at all n locations
  Clone ID: uC-osroM202036g11a1
ccgcgagcggaccctaggcggccccttttttttttttggttttttttttttttggttttttttttcccccaaaggntattt

SEQ ID NO: 41357 - DNA, 487 bp, Oryza sativa
  unsure (1)..(487): unsure at all n locations
  Clone ID: uC-osroM202036g11b1
tatggatgctggtctggagaaagctgccagaagtgcttcccaatcaaaggtggaaaatggctcaccttcagaaatcattttagatgattttgaagacttgagccctctatcagaaaatgatgactccactgttagtatcactgtagtcggagcatctggtgaccttgccaagaagaagatatttcctgcactttttgctctatactatgaagattgtcttccaaagcatttcactatcttcggatatgcacgcagcaagatgacagatgctgaattgagaaacatggtcagcaaaacactgacatgcagaatagataaaagggaaaactgtaatgagaagatggaagagtttttaaagagatgcttctatcattcaggccaatatgattcagaggagcatttcatggaccttgacaagaagctgaaacaacatgagggttccagagtttctaaccgtctnttctacttgtcaataccaccaaatata

SEQ ID NO: 41358 - DNA, 171 bp, Oryza sativa
  Clone ID: uC-osroM202036g12a1
aaatggaaagaatatgggatttattttgttgtaacagcatattatctgttgtctcgggacaaaatttcttcttcggctatttacagtttggtcaggttttcaacagagggatgcatcaaaattacaacaggaggacggagcaacttgttcaaaaaaggctaaggaaaaatt

SEQ ID NO: 41359 - DNA, 521 bp, Oryza sativa
  unsure (1)..(521): unsure at all n locations
  Clone ID: uC-osroM202036g12b1
cacccaaatcggcgagccgtgcagccgccgccgtactcctcctcccgaggcgtcgcagccgccgccaccctgacacctctccccgccgtcgcgccgccggcgctcgcggcgcccatccaccgtccacctgttgccaccgccgcatgcgccagagggaggcctagcgcgctcgcggatccctcctcctcctcgcctcgcccgacgacgacgcggcttccagcgatgcatcgcgcgatgcggctgcgcggcctcctgcgcccgcagctcctgcgcacgcatgagaccggaggcgcgcttgtcgtggggctcggagagcctggcgggagcgcggtgccggnnaggccgcctcccctgcctttcggcgacgggcggcggcggccgtcgtcccggttctactgctccaagggcggcgtcngcagcgtggaggcggctgtggggagcggcggaagcggtagtagtagcagcagcagcgagcaggagcacgcgcggttcggggagagggaccaagaggaatggctgag

SEQ ID NO: 41360 - DNA, 153 bp, Oryza sativa
  Clone ID: uC-osroM202036h01a1
ctacgaaacgggttcacagtataccacacccggaggaatccaaattatgtttgcagtttaccacccagtaccagttcacaggatcgaattaatattattcgacattcaacctatttaataaccactacaaaaccacccctaattgtttttaca

SEQ ID NO: 41361 - DNA, 149 bp, Oryza sativa
  Clone ID: uC-osroM202036h02a1
gatgcactgccacacttacgctagcttgcattctagttgggcggccttcctttttttttttctacgaaacggattaaaaggcttccaaaccatgtggaataacaaatagatgaacagagaacaaaaacctacccagtaccagaagacag

SEQ ID NO: 41362 - DNA, 374 bp, Oryza sativa
  Clone ID: uC-osroM202036h03b1
gtggcgctggcgatcgttattgtcttactcagatcgcctgccgtaatgcgtggtgggatcattcttaatagccacgaggctaaatgaggtgaacctatcgcggacagaaccactttgtcgccatcgcatttctgaggagctgacaaagtctgaatgcaggaattacacgaattcctgaacaaaatgcctctgaataggcggaccctagtttcaactgtgagtagaacaagttcggaactcagatcgtgagtgatgtttccgagctaaagggccgagtgaaagttgtaattgacttgaggtcctactagaaagtatattggccgtccggacagagagatggaccatccgtggatgcccacgcaactattgaagca

SEQ ID NO: 41363 - DNA, 346 bp, Oryza sativa
  Clone ID: uC-osroM202036h05b1
ggaataagcaccgaagaacgactatcgatagaagttgatgatgaggcgcagcttggtgattgtgatggtggcctgcagctgcgccacagccatagccagaggaggaggaggaggaggtttgtagcttatcttctatctcgattttgactgtttcaatttttctctctatttttggttatctttattactttattttcttttttcttttacttttttttacacttttatctactcttcttcttttttactttttttcttctatctttaatcgacaaatccttttttccttttttattaattatttactttttcttttttttttattttatgtttatttctacttttt

SEQ ID NO: 41364 - DNA, 306 bp, Oryza sativa
  Clone ID: uC-osroM202036h06a1
ggcacattaaaaaaagaagataattgggtgcggggattgagaaacaactttctggattttgtatgtagccccgtgcttacaatatttatgcctgaaaaataaacagacgataaaaaaatagtctcaaacatagagttaagagaacagtttttccactgtcagtagcttgcacagtacagcaatctaacaataatctaacatcagtcatgacacttctaaatgctaaaactaagtacgcaagatatccatatctagttctgtatatggtgcccatcgtttttcatcatcacacgactctgcaagaaa

SEQ ID NO: 41365 - DNA, 331 bp, Oryza sativa
  Clone ID: uC-osroM202036h07a1
atcaaaacgcttgcaaatgatatgaaataagatagtagatcaacagagacataaacctccatatgccaaagacacacctgcccaactccacccaattacgccattatttctgggcaaaagcaaacggcttcccattcctccccttcaccagtctcaaaccataaaccccacaacaaatcctcctaagtgacggcatataagatgatgaaaacaaagcaggatactccagagtcgtcatggcgaacttcaagttgacacttctcatgccacagccgctagtcgtgctgggcagcctagtaccggtagtgcgcgggcttgtagggaccctcaa

SEQ ID NO: 41366 - DNA, 336 bp, Oryza sativa
  Clone ID: uC-osroM202036h08a1
tttttgttttttttttttttttatggggaaaactatgttataaaggaccgaaacaacatcgggtttacttgtttaatcggcgttggaggaggagatttgatcatgggtggccataggggcggtgtgagaccagtttctgacccattcaggggggacactctttggtctttcaagtgggaatccgagggcctctggtccagacaaggttggataagacaccaatagctgtggaaacaccgaagggaacggggtagcagttgtcttcagacattccgtagtgaaccaacagaactccagggtgggcatccacattaggccatgggttcttgggctttc

SEQ ID NO: 41367 - DNA, 191 bp, Oryza sativa
  Clone ID: uC-osroM202036h09a1
ggataataataataataatattattaatgccattttatgaacattgcacaagctgctgcagcagcatcaaccaaccaacaaaccaaactataaacttcctctgctccatttctgcctccattttcatggacagcaacatcatatctctgcatttttttttcaccggttggtgtgacctgaaaatttagaga

SEQ ID NO: 41368 - DNA, 258 bp, Oryza sativa
  Clone ID: uC-osroM202036h10a1
tatttggtaatgtgttacacaaaaaggttccagaattattacggacaagacattttagataaccatagattgccctctagatatcaaaaccacattaagcaacagccgcagaatgttccaatggtagccagcacctcccaaggcaaatcagtacttgtagtccttgacgtgaaggctctcggaggcgccctcgccgaggacagcggtacccttgtatgtaccgagggtagcctcggagtggccttgcacctggtagga

SEQ ID NO: 41369 - DNA, 505 bp, Oryza sativa
  Clone ID: uC-osroM202036h10b1
ggtcacccccctccccctcccttctcgcctcattccccacagccgccgcctccttcctctcctcgatctccctattcgtcgtagcctcctccctcgttcgctccgcccgcaaccatgtcggcctactgcggcaagtacaaggacgagctcatcaagaacgctgcctacattggcactcctggcaagggtatccttgctgcggatgagtccactggcaccattggcaagcgcttcgccagcatcaacgtcgagaacgttgaggagaaccgccgctccctccgcgagctcctcttctgcacccctggcgccctccagtacctcagcggcgtgatcctcttcgaggagaccctgtaccagaagaccaaggatggcaagcccttcgtcgatgtcctcaaggagggtggtgtcctcccgggcatcaaggtggacaagggcaccatcgaggttgccggcaccgagaaggagaccaccacccagggccatgatgaccttggcaagagatgcg

SEQ ID NO: 41370 - DNA, 157 bp, Oryza sativa
  Clone ID: uC-osroM202036h11a1
ggtgctcaaatcacaagcttttacacgtatatatatatagtaatgatggattttatctttacatatgattctttaccctatcacccccaccatcctaaccttatattaacattttccctgctataaccctcctcctttctgttatttaaatggccaa

SEQ ID NO: 41371 - DNA, 387 bp, Oryza sativa
  Clone ID: uC-osroM202037a01a1
ttggggtttttttgggtctgggggattcatgaccaccaggtataggtgctgttattattgcacaaaattcacaaaaactcaatgaccaatgcaacgtgtatgtacgtatatctatgtgcatgcactccatcatgcatcatccctggttgaccgggcagaatgtatgtgcgtgtatcaatataatgcactcctctgcatcgagcgaccagccgctgacgtaggctagcctgtcgaggggcgaccggaatttcttggcgactgagccattctggcaccggagcgcgctttcaccggcttcccaccagcaccgggtgcagaccgagggtgtgcttcagcatgaaggcctgccttgccaggatcgcgagcatccggcacctgattgaggac

SEQ ID NO: 41372 - DNA, 456 bp, Oryza sativa
  Clone ID: uC-osroM202037a01b1
gtttgttgagtggaagcagatcaggaagatgctggagaagctgtgggacgacgtggtggccggtcctcgaccggagaccggcctcgagaagctccgcaaggccgctacaacccgcccccttgtcatcaacaaagatggcgacggcgaggcgagcggagtggcgtacaagcggacgcagtcgatgccgacgaccccgacgacgccggtgacgccgtcgtcttcgtccccgacgacggcgacgacgacgacgccgcggggcagcaacgtgtggaggagcgtgttccacccggggagcaacctcgccaccaagagcctcggcgccaacctcttcgaccgtccgcagcccaactaccccaccgtctacgactggctgtacagcgacgagaccaggagcagccatcgctgaactgaataatccattgatcggaggctgacgatcttatgtcacgccatgtt

SEQ ID NO: 41373 - DNA, 443 bp, Oryza sativa
  Clone ID: uC-osroM202037a03a1
tttgggtgaatccaaagagggagcgcatttgtgtctaagtaacattcaaggagactcactgggtgccttgctctgtttggatcccattgcactgcagaaccagggttattctatggtaccctctccgttcgtagcagggctactactttacaacacccccagtacaccacacctgagcagcattactcatggaggccttgattccaagaaactaacacgggtcctctttctcaaggttgacaggaactatcaactgtgggggcagacactaataggtactggctagcctgacttgaatctgtgtacaaacttttgcaggtcctgtttgcagtactgcaccaccctcttcgacttatccccaatggttgaaccaaacacgtagacacttgcctgtgcttcggatgacaacttctttgccttcaaagcctgagcagcccctagat

SEQ ID NO: 41374 - DNA, 305 bp, Oryza sativa
  Clone ID: uC-osroM202037a03b1
tggttttttttttttttttttggggttttttttcgaaaccaaagtatggggaaaagtttttccaaaccacactttacctttagaaattaagacctttccccatatttgagtttagcttgatcaaactatttatttatttgtcggcaagccaacatttatcactttcacttattgagccggcatggggagaagttgagagcagttttaatgggggccaccatggtgaccgccggggggaccgccataaaagccgccgtgggggccctattgttcctgatgaccgccataaaagcccacatgggggt

SEQ ID NO: 41375 - DNA, 464 bp, Oryza sativa
  Clone ID: uC-osroM202037a04a1
tttgtgtttttttattttgggggggtggaatcgagtagcaatactttcaccccaaaatacagtttagcgacaatatcttagaaaagccgcttgctttgccgccatggctggcaagctgagcagagcagctaacacaaagaacacgagatcactataaaccaaacggcaacgaacgaagaaaatacagggtcttttttgtctgaagatacacgaagcgggtcgttttcttttatttttaggctcctctcctcctcgatgatgggtgtatggcaatggcaatggcgatgggatcttggcttagttgatgggaaggggctcgccgttccactccttgaggcagtcgagcatggggtcgatgagcttgccctggctgatgccgaggaacaccttgttgcactcctcgccgggggacttgagcttctcgccggtgaggaatacgcagccgagcttctctcggaccaagc

SEQ ID NO: 41376 - DNA, 175 bp, Oryza sativa
  Clone ID: uC-osroM202037a07a1
tcgcgatctaggaccctttcctctttggaggttctatttgcaggtatagaacttgaagtaagagcgagcataacaatgccagacttagaactgccttggctccagatggaatgctcatcccctttttggagcttccaccaggagagtagtaaataagaacgaagagaccaagaac

SEQ ID NO: 41377 - DNA, 506 bp, Oryza sativa
  Clone ID: uC-osroM202037a08a1
ttcgatttctcctctaagcttcccgcgacaaagctgtagtttctttctcgatcagaccacgtacgacaatggaaaaggacaaggggctcgtctccaacctcatgcacggcgtcgccggcggcggccatgcctatccgtaccctcctcagcagggctactaccctccgccgcccaccgcatatcctcctccggctggctatgctgcgccataccagggttatggaggtagccatggtggaggagggcacatggctccgatgcttggagcgggtgcagccgtcgccgccgcggcgtacggtgcacacaagctttcttcccatggcggccatggaggctacggttacggttacggcggtcaccatggcggcggcggcttctttggcggcgatcaccatggccacggcggccatcacggcgaatactatggaggccatcacggacacgacgaccaccatggcggcttctatggcggtcatcacggacacgacggccaccacggcggcttc

SEQ ID NO: 41378 - DNA, 77 bp, Oryza sativa
  Clone ID: uC-osroM202037a09a1
ttgttcctttaaaagcggaggaaaacttcattagaagttggcaccggcacacaagctagcaccggcccttacaacaa

SEQ ID NO: 41379 - DNA, 430 bp, Oryza sativa
  Clone ID: uC-osroM202037a10a1
tttgtttttttttaacaaagggggaattagtgcattactccataatttctaggaatcagaaagagggattagtagagatgattgccgcaaaaaaaaagggataatatattcagttccaaatgactaaaactgatcccaaattatggttactacatagtcgaaaaacagaaggctgcggaagacggctcgatgatggccatggctgtacttgaaacagggcatataccaccatacaggcctgaaatcacacgcagaaccttaaacgagtacctcattttcaaataagtcgggcaacctaaactgactttaagctctccaattacatccataaacagccggccaagaagtactttcatttgaaagaagatccaactattggtataacaatgtcctcaagcaacggtatcaaaaaccaaagaaaccaagctcg

SEQ ID NO: 41380 - DNA, 436 bp, Oryza sativa
  Clone ID: uC-osroM202037a11a1
tttgttctgactttggagcgggcagtatcttaaaaagaagcttctgacatttattatttcatcgatgatttcaaagcgcgcaaaagaaaatcgaatacaaacaaacagcttgggcttctctctctctctctgtctctctctctctgtctcctccaaatctttggaaagaagaaaacacagtggaattaaaggctaatacaacaagaggagaagagagaaactttgaaggaccatcatatgtatgatcctcatgtgtcgattcacttgagctatttagtagtaggagtttagctgcccttggtggggtaagaggccatcttgatgatgccacatagaccttcacccttgccagtgcccctcttgatgcggctgtaccccttctcgccccaatgtgggccccatgagttcttcacgatgatgtaatcttggcccttgc

SEQ ID NO: 41381 - DNA, 386 bp, Oryza sativa
  Clone ID: uC-osroM202037a12a1
gctgctgctgctggtgtcgctggcagcgggggacatgtccatcgtgtcgtacggggagaggagcgaggaggaggcgcggcggctgtacgcggagtggaaggccgagcacggcaagagctacaacgccgtcggcgaggaggagcggcggtacgcggcgttcagggacaacctccggtacatcgacgagcacaacgccgccggcgacgccggggtccactccttccggctcggcctcaaccgcttcgccgacctcaccaacgaggagtaccgggacacctacctcggcctcaggaacaagccgcggagggagaggaaggtcagcgacaggtacctcgccgcccacaacgaggcgcctgcggagtccgctgactggaggacccaggggg

SEQ ID NO: 41382 - DNA, 369 bp, Oryza sativa
  Clone ID: uC-osroM202037a12b1
gtggggttttttttttttttgggcaatgaccttatcttgttccaatatcaatttgcagttccgtcgaactggcatttaggagcttaggagcaaacctagctgaattttacatatacattcagaagcaaatttggcagttttgtaaccaactgaacccgtttttttagattttatgtacacgagaaatctattataaaagccgatatacttagtgcgcagggttcgccgccgagctgcgcaatcgtttttgtcagttaccagctgatcatttgatgatgcaaccacgctggctctggacggtctgataccgttctgaaattgctcaagcgctgctcttcttgccgttgccaaacaagaaagacaagtttg

SEQ ID NO: 41383 - DNA, 484 bp, Oryza sativa
  Clone ID: uC-osroM202037b01a1
tttgtgttcaccgggatcgggaagtgttgtatttacatttagatgcagcaccattacacccgaaaatgaacaaaacaaacaacctgttgatccaccaatatgaaacctacctaaatgaatccgaatgaaattcactctacctataagaattccaacgactgaaaattctgtcaaaattccagcacctgaatctatctctagttctctacactactatgacttgatcctgattgctcccattccagtcgtccccttgctgttgagtatccccggcaatggccaaccggaccctctcagcctcgacctcttcagcgcgccgctgcaatcctcgtctgagtcatcgtcgccgccgtcgtcgtcgaggtcgacgcagacgcctttccctttccggtcgtacagcgcgggggcctccggcgtcgtcctctcggagaagctctcgtacaggtcaggcgagtgctgccggaacagcaggtcgctcgccgag

SEQ ID NO: 41384 - DNA, 524 bp, Oryza sativa
  Clone ID: uC-osroM202037b01b1
gcaatctccccctcctcccgtctcgtcgtcgtcaccgccgccggctcaccccccacccgtcgccgccggcgcggaggccaagccctagccccagcgcggccgatcgcctcgatcccccggcgagccgatgggcgtgcgccgctgaagcatgccagcgcgccgaggccgtggaaagcggaagcagcagcagccgccgccgccgccgacgggcccagcggacgcgaggcagccggaggggaagcagcgggaggaggagcggaaggggatggaagggtccgacaaggggggcgccggcgacgacgggagccccgcgccgctcccggagacggtacaaatcggaaattcaccaacgtataagcttgagaggaagcttggaaagggaggatttggacaagtatacgttggccggcgtatttcctctcctactcatggtaacagaaattctggtgcaaatgcattagaggttgcgctaaaattcgaacatcgaacccagcaaggttgcagctatggagctccctatgaat

SEQ ID NO: 41385 - DNA, 475 bp, Oryza sativa
  Clone ID: uC-osroM202037b02a1
ttttgtttcaccgggatcgtgaagtgttgtatttacatttagatgcagcaccattacacccgaaaatgaacaaaacaaacaacctgttgatccaccaatatgaaacctacctaaatgaatccgaatgaaattcactctacctataagaattccaacgactgaaaattctgtcaaaattccagcacctgaatctatctctagttctctacactactatgacttgatcctgattgctcccattccagtcgtccccttgctgttgagtatccccggcaatggccaaccggaccctctcagcctcgacctcttcagcgcgccgctgcaatcctcgtctgagtcatcgtcgccgccgtcgtcgtcgaggtcgacgcagacgcctttccctttccggtcgtacagcgcggcggcctccggcgtcgtcctctcggagaagctctcgtacaggtcaggcgagtgctgccggaacagcaggtcg

SEQ ID NO: 41386 - DNA, 67 bp, Oryza sativa
  Clone ID: uC-osroM202037b02b1
ctaaccctagccgcctccgtagccgcagccgcagccgcgcgtcgtctcctccgcccgcgagctcctc

SEQ ID NO: 41387 - DNA, 437 bp, Oryza sativa
  Clone ID: uC-osroM202037b03a1
tttggttttttttttttttggggtatctgcatttccacggcccttactattcatgtttttcttggaaaacttccatccaagcaataaacccatcagtttattggattccacaaaattccccaaatccatcacattgcaaggttgccctcctcgtgatcttgcaagacccagcgcccgctcgcgttctgcaccatgcccttgttcttctccacccaccacgccgccggcacctggtactcgtccctgagcgcgtccactttcttgttcaccagcgccaggtcacggtccaccacaaggctgaaccccgcgccgtcgccggcgccctgcgtgcccgcgacggcgtgcaggtagcactccaggttgtgccactgggcccggcccgccgggttcttcaggtaccgcgaccggcgcgtgttcacgagcagattcccgcccac

SEQ ID NO: 41388 - DNA, 417 bp, Oryza sativa
  Clone ID: uC-osroM202037b04a1
gctccggcgaggtcggccgggtacaccgccgggccgttggcgtagtacagcccccagtgccgctccgtgccgggccccggcttgaggtcctcgttgtagagcgagaacacgaacaccggcatcttcgcgccgggccgcgccggcgtgccggggctcctcgccatccgcgccgcgaggttcctgttgtagatggcggcgctgtgggcgttgcagccgatctgctcgtagtcgccgccgttgggccagccggtctccgcgatgcccagcttcacgcccccgtaccccagcttcgccatcgcgtgcaccacggcgtcgagcatttcgtcgagcatgttggtgtatgtgagccccgtgcccggatcaacgtagcggccgtcgccgccgccgccctggaagagcgcgtactcgagcgggacg

SEQ ID NO: 41389 - DNA, 453 bp, Oryza sativa
  unsure (1)..(453): unsure at all n locations
  Clone ID: uC-osroM202037b04b1
aaaaatatacaaatccacaggctttccctgtaattttctcccatatcgcctttctcctcgcaagcatgtgtctcctccccactttgcacttggcatttgcaccccagctttgcctctacctcactagtagtagtaaaaaaacgttaattacattgtttactcgaaagcccacaggattaaccgcttaacccaatgcaaccgttgtcaaggctaaccctaaacactttaatttaaaactcctacttaaaaccccccttccagaagacatcccgctccagtttcccacgccaccgtcgaacaccttcacccatggcgtccatggccgccctcctcgtcgtcgtcttcctcgccggctgccacggtgagcgccgncgnccaccacctncgncttntngtgttcttacttgagatatggctaaatgttttttttaatttttttttggctgggagtgg

SEQ ID NO: 41390 - DNA, 432 bp, Oryza sativa
  Clone ID: uC-osroM202037b05a1
ttttggttttgacagcgaaggaggaggagatatattaattacggtgtatcgtttcaaggatgagttcggatgagtgatcgatcactctccacatacttggatcggtctctctcgcacacgtacaacgacaaggggagacggtacaacagcagcggcaacaaacacgcacgtacacgggtagtactacagaacgcgccaacgtcatgggcgattggtgagaaaacacgcacacctactagtactagctttatccttttttagtgtacaccacacggccgtcgactatctcatcggctagcgcgatcaatggccgtccggccggccagcttcgagcgttatgcttccatcttcccgctggctgtcccgttggccacaaccaggccgacgccgttcgtaccgttggccgccatcgcgcagctgccgttggccttg

SEQ ID NO: 41391 - DNA, 495 bp, Oryza sativa
  Clone ID: uC-osroM202037b06a1
cttttgttttttacatctggggtataattcaatgggccatcaagaaacacccttcaaggaaaacatccagtgaaggaagatgacttagttaacatcaagtatctaaagcttatcatcaaggagactctaaggctgcatcctgtggtaccattgcttcttccaagagagtgtctccatgcgtgcaaggtcatgggctacgacgtgcctaaaggcaccaccgtgtttgtgaacatatgggcaattaacagagaccccaagcattgggatgaccctgaggtgttcaagccagagcggttcgatgatggcaagatcgacttcaaaggtgcaaactttgagtatattccgcttggtgctggtaggaggagttgccccggggtgacattcgggcatgccaccgtggagctcatgcttgctacgctcttataccactttaaatgggagcttcttgaaggagttgcgccgaacgaactagacatgacggaggagataggcatc

SEQ ID NO: 41392 - DNA, 531 bp, Oryza sativa
  Clone ID: uC-osroM202037b07b1
atcatttcttgcttcctcagctgcttcttcctccttcctcttcacacgacgctcccatttttatttatatatatcagcatcgtttctcctggcgtcactgcacccataactgccaagaattggagctgtctcttctccctctctctctctctctctctctctctctctctctctctctctctctctttctctctgcatctgagagagagccggaagaattggagttggagcaggagaagcgtggagcttctgaggattgattttggaaatttggagcttgaggatcggattgagtagtttctgaggattgggaacaggagagatcgaagcaggagctaggagaagcgtctggaactgaaggggaaagcgagaaaccaaaaaaaacaaaagatagacatcgagcttgatcggttagcacctgccggatacaccttttgctgcatgcgagtgatgttctgtggccttgtccgctcatggcaatctcaaacgccagagtggttcgccatgtgaggtgtcccaaatgcttcagtg

SEQ ID NO: 41393 - DNA, 455 bp, Oryza sativa
  Clone ID: uC-osroM202037b08a1
aacgaaaggcaccctgcgaactgcaggggctgatacggtaattaaattgtctcccaaagatggactatgggagtaaaaacaagcatagcagtttttgttttgccacttaacccagcaaaatggcgctaagaagacaccgtgtagcgattacttcacgatgcagatcttgatcacggatgcgacgccaatacggggcagagcaacaacagcatcaccaggcttgcacaactgcttctgtacagctgacttgagagcagcatcaaggatgacctttgtcgactccgaatcgggggctttggcagaaccctcagccaggagaggaacaagacctctgtagattaggctgtgccttgctgggccctccgagctgattgtccagtccaatgaatcggttgtcaacacggggacaaccacagagaggattggaaccctgggacgatacttggcaaccagct

SEQ ID NO: 41394 - DNA, 523 bp, Oryza sativa
  Clone ID: uC-osroM202037b08b1
atcattttttgcttcctcagctgcttcttcctccttcctcttcacacgacgctcccatttttatttatatatatcagcatcgtttctcctggcgtcactgcacccataactgccaagaattggagctgtctcttctccctctctctctctctctctctctctctctctctctctctctctctctctttctctctgcatctgagagagagccggaagaattggagttggagcaggagaagcgtggagcttctgaggattgattttggaaatttggagcttgaggatcggattgagtagtttctgaggattgggaacaggagagatcgaagcaggagctaggagaagcgtctggaactgaaggggaaagcgagaaaccaaaaaaaacaaaagatagacatcgagcttgatcggttagcacctgccggatacaccttttgctgcatgcgagtgatgttctgtggcctagtcggctcatggcaatctcagacgccagagtggttcgccatgtgaggtgtcccaaatg

SEQ ID NO: 41395 - DNA, 432 bp, Oryza sativa
  Clone ID: uC-osroM202037b09a1
tttgtttatctcaagctggggttggtattatcacatcaaaggtaattaaacgctgaaagtagggaaacacacggcagtatttacacatggaagatgtttacacacaaacacacttctttgggttgtcgctagcccttgataggagccagcaggctagctgacacgtaccggtctctggtagtactaacagagacagcaagctactaggaacagagtaacaagataagatagcaacatactagataattaattacgtattagataaccacaaggaccagcaaacatggcgtgacagagagatcgaccagcctccgatcaatgggattattcagttcagcgatggctgctcctggtctcgtcgctgtacagccagtcgtagacggtgggggagttgggctgggggcggtcgaagaggttggcgcctaggctctt

SEQ ID NO: 41396 - DNA, 483 bp, Oryza sativa
  Clone ID: uC-osroM202037b09b1
ctttccttcatctcttggttcaaaggccggtctttccctgcacgttcaggcagtgtgggatccatagtaacttgtacccatccatcccgtgaggccgtgatccagctcttgtttctcctttctttcagttgcatgtacacaaagttgcacaaatgtgttgctttctgctggtctctgtactgctagccaccactctcaccgacgtagccagtgcacagagatggaggcagacgagcggcggcggcaaggacaggtgggacggcctcctcgacccactcgacgccgacctccggcgcgacatcatccgctacggcgagctggctgcagcgacgtcggacgcgctcatcggcgacccggcgtcgccgttcgccggcgcgtgccgggtacgcgcccgacgcgttcctccgcaaggtgcgggcgtccgacctggacgcgtaccgtgtcacgaggttcgattacgctacttctagcgttcgtcttccc

SEQ ID NO: 41397 - DNA, 455 bp, Oryza sativa
  Clone ID: uC-osroM202037b10a1
tttgtttatctcaagctggggttggtattatcacatcaaaggtaattaaacgctgaaagtagggaaacacacggcagtatttacacatggaagatgtttacacacaaacacacttctttgggttgtcgctagcccttgataggagccagcaggctagctgacacgtaccggtctctggtagtactaacagagacagcaagctactaggaacagagtaacaagataagatagcaacatactagataattaattacgtattagataaccacaaggaccagcaaacatggcgtgacagagagatcgaccagcctccgatcaatgggattattcagttcagcgatggctgctcctggtctcgtcgctgtacagccagtcgtagaccgtgggggagttgggctgggggcggtcgaagaggttggcgcacgggctcttggtgccaggttgctccccggtgg

SEQ ID NO: 41398 - DNA, 332 bp, Oryza sativa
  Clone ID: uC-osroM202037b11a1
gctgctgctgctggtgtcgctggcagcgggggacatgtcgatcgtgtcctacggggagaggagcgaggaggaggcgcggcggctgtacgcggagtggaaggccgagcacggcaagagctacaacgccgtcggcgaggaggagcggcggtacgcggcgttcagggacaacctccggtacatcgacgagcacaacgccgccgccgacgccggggtccactccttccgcctcggcctcaaccgcttcgccgacctcaccaacgaggagtaccgggacacctaccttggcctcaggaacaagccgcggagggagaggaaggtcagcgacaggtacc

SEQ ID NO: 41399 - DNA, 441 bp, Oryza sativa
  Clone ID: uC-osroM202037b11b1
gggcaaggaccttatcttgttccaatatcaatttgcagttccgtcgaactggcatctaggagcttaggagcaaacctagctgaattttacatatacattcagaagcaaatttggcagttctgtaaccaactgaacccgtttttttagattttatgtacacgagaaatctattataaaagcagatatacttagtgcgcagggttcgccgccgagctgcgcaatcgtcttcgtcagttaccagctgatcatttgatgatgcaaccacgctggctctggacggtctgatacggttctgaaattgctcaagcgctgctcttcttgccgttgccaaacaagaaagacaagtttggctttgccagggtacgcttcagagccttcactgccagtggactgtccttagccatgaggcaggttccctgctgaacattgcagatggggtac

SEQ ID NO: 41400 - DNA, 405 bp, Oryza sativa
  Clone ID: uC-osroM202037b12a1
accatcctttcaccccaaaaaacggattaacgccaatatcttaaaaaagccacttgacttgccgcccttggtggcaaagctgagcaggagcatctaacccaaagaacaccggaaccactataaaccaaacggcgacgaactaaaaaaatacagggtctttttttgctgaagatccaccaagcggctcgttttcttttattttttaggctcctctcctccaccatgatgggtgtaaggccacggcaatggccatgggacctcggcttagttgatgggaaggggcttgccgttccactccttgaggcatcccagcatggggtccatgagcttgccctggctgatgccgaggaacaccttgtgcactcctcgccgggggacttgagctcttgcccgagaggaaaacgc

SEQ ID NO: 41401 - DNA, 494 bp, Oryza sativa
  Clone ID: uC-osroM202037b12b1
tttactcacacaaaccaacgcgacgcacgagagattggtacgtgaagcacctgcagcgggcgacccaatggagaccccgactctgaccacgctgctcaaggcggcggtggccacgttcccctcgcgccgcgccctcgccgtcccgggcaaggtcgacctgtcgcacgcggcgctcgacgcgctcgtcgacgccgcggccgcgcgcctcgccgccgatgcgggcgtgctccccggccacgtcgtcgcgctcgccttccccaacaccgtcgagctggtgatcatgttcttggcggtgatccgagcgcgcgcggtggcggcgccgctgaacccggcgtacacgcaggaggagttcgagttctacctctccgactccggggcgcgtctcctcatcaccaaccccgagggcaacgtcgccgcgcaggcggccgtctccaagctgggccttgcccacaccaccgtcagccttaaggacgccgtcggtcaagtcacctcgc

SEQ ID NO: 41402 - DNA, 375 bp, Oryza sativa
  Clone ID: uC-osroM202037c01a1
gcacaggacaactacacctgtctggagttgcatgtattgtggattctcgattacagtcacagcaacaaggcttattatatggaaccttacgacctggggtcagtcgcaatacttagcaacaccaccagatcaccacacctgagcagcttcactgatggcggaagctattccaagaaactaatacggaacctattcgtcaaggtctacatgaactatcaactgttggtgtacacactaatagcctctgtgtagctttacttgaatctgagaacaaactgcttcaggcccttattgccggtgtccaccaccctctactacttatccccaatggctgaaccaaacacgtagtcaatagcccgtgctttggaggacaac

SEQ ID NO: 41403 - DNA, 419 bp, Oryza sativa
  Clone ID: uC-osroM202037c02a1
tttggttttttttgtgctatggggtcaccaaattcattatttataccggtaaaaacttgtccctgatttttttacctgttttacatagactagcaatctgtaccagcctaaggtatgtctggatccacaggaaaacctacgacctggggagctccatgagagcctgaccgacctctgtggccttctgtgctaccaagggggggcgaccttgctattggaggggctggtgctcggtgatgttgaacctcaaaaggttctagagcaggatgatgaaatattgcatgtattctgagcttgattggaccttacatctgcttttacgctccactgcctggagcagatctcgactggtaggatccttcaaactgactggttgccaacacataggacactgagaacttgtctgacaccattcaaga

SEQ ID NO: 41404 - DNA, 372 bp, Oryza sativa
  Clone ID: uC-osroM202037c03a1
tttggtttttttttttttttggttttttttttttttgtcctttttttttttttttaaggagaggcgggggatggattttccttcaaacctggggtcaaaacacgctcgtccaaatcaggacactgtccattttaccagaccatgatgatgattgggttaagactggattcctaaaaccctacctaggatgaagtttgggttttacattcaaacccaaggggtccatgcgggggggaaaatttttctttttttttacctaggcaggcctgggggaacaccggcactaaaaatttgtgggggggggggacctggccaggaagagacaaaaactccttgggggccctaccatcagtgggcggaatcccagggggg

SEQ ID NO: 41405 - DNA, 427 bp, Oryza sativa
  Clone ID: uC-osroM202037c04a1
ttttggtacaagtaacgattggtaaacacgaaaaattccgcaatcatgcgaattattcacagaatacaccaaagtatgtgtaactgcttgtccaagaagatagcgaaggttaatatagcattagcataacatcttacagtaggtgtctacgataagaactattgacaaagtttccacacgctgtaaaatgccaggggtcccttttacataagatggcactccatggatatatgtttacaccgacttgttcttgcaagaattccaacagtcacctcaggaattcagcttgatgccttttcttttacccttgctgttccattcaaagtttcttagttcttgtacttcatggtttttttctcaaacccaattgtggggaactgttttgcatattcctccacatcatggcgaagttttgcaatctcggatt

SEQ ID NO: 41406 - DNA, 412 bp, Oryza sativa
  Clone ID: uC-osroM202037c05a1
ttttgttttctgaaagcatggagattggatggacgctatagacaacattggtcgtcaaaaagtaaaacctcattgtaatttgtacgcttgatcaagtataaagaaagggggtaattacaaccagatggagatacacactgacagcttaagcaaatgactatcttttattatcttatccatcaaactttcacccaaagtgcttgccaacatactaatcacaattcacagccactgaagtagatattccacgggcaccatctgcttttttctgcaaccatattttgccaacctgatgcgcttcaactccagaacaccagctttattttacctttttgaaaaactatgttatgcactttctgggctgctctgctctatgaatcacacctgcctacatggagctttgaaaagaatg

SEQ ID NO: 41407 - DNA, 461 bp, Oryza sativa
  Clone ID: uC-osroM202037c05b1
ttgtttttacacccacccggtttaccagagatccgggcccgccacttgtaaacctgctgcacccatggcgcccagagcagctacggtggagaaggttgctgtggcgccacccaccgggcttggtcttggcgtatgaggaggtgtcggagccgggggtccttactacaggggcgtccgcaagcgcccgtgggggcgttacgcagcggagatccgtgaccctgccaagaagagccgggtgtggctcggtacctacgacacggcagaggagggccgccgcgcctacgacgccgtcgctcgagagttccggggtgccaaggcaaaaacaaactttccgtttgcatcacagtcgatggtcggctgtggcggccgccccagcagcaatagcgcggtagacaccggtggcggcggcgttcagacgcctatgccggccatgcctttgtcgccgactatggactaggatt

SEQ ID NO: 41408 - DNA, 358 bp, Oryza sativa
  Clone ID: uC-osroM202037c06a1
gtgttcttagaagacgtgagagtataactgtagcactagaagagtacagcaacacacgttaattaatcacgcgagagcgatggatggatcggccggtaaggtctcggtctcgacctcacacgaggcggcggcagatggtgatgccgtcggcgatggcgagctggcagacgtcgatgcgcgggtcggcggcgagcctggagttgaggtccctgatggcgacggagaacctccggtccaggtccgacagcggcgtgtccggcggcagcgccaccgtgccggcccacagcgtgttgtcgtacacgatgtgcccgccgacgcgcaccagcttgagcagctgctcgtggtacttgacgtagtt

SEQ ID NO: 41409 - DNA, 468 bp, Oryza sativa
  Clone ID: uC-osroM202037c07a1
gccgacttgagcgcggcgatgttgctgagcgacgcgaacatccggtccttcctgcccgccatcaccctgttggagtccaggaatgtggcgctgagcttgccatgcatgtcgcccctccacttgtgcagcgacgacaaggggtcggccgccgccgcgagctcgccggcgccatgaccgtgatcggcggccttccgtgctgccgcgagctggccgtcgagctccttggcgcgcccgcgcgcctcggcctcgctggccttgaggctctcgttctcctgacgtagtgcctccatggcgctctccttctccgcgacggcgtcctgcagcttggagttctcgccggtggcgagctcgagcgactcgttcgccgcgttgacctcctcgacggcgcgctccagagcgcgacgcaggctgccgttctcgtcgtcgaccacccggtgcagctcggcgagctcgacgttctcttgcccg

SEQ ID NO: 41410 - DNA, 476 bp, Oryza sativa
  Clone ID: uC-osroM202037c07b1
agtttcctttgcaaaacagcgagctagttcctcctgacaaatatgttcctagtgaggatgcaagtcaagcgcacaatctcgttgcttctgatggggctgaaagcctggtgtctcctttgtcaaactccacggaaccttccatcggtgcttatgactcgcctgacaaactttacggtgtaggtccctctgagggaactccttatgtagaagatacattgaactgcgaaattactttgccagaaaaccagcatctgggtgaaaccttaacgtcagatacaatgctaggttcaagtgatgcttcgcttatccaggaaatctctgacactgcagcttcatctgatgcaaaggacaaagatactgagcagaatcctgaacttcatagaaaaaatgggattataccatcaagaatgcctgattatacagaatatggacatgctgatcagttgcttttatttggttcaaatgatgtgtccaca

SEQ ID NO: 41411 - DNA, 482 bp, Oryza sativa
  Clone ID: uC-osroM202037c08a1
tttgttttgaagtaaaatggagtccgtttttatagaccgtgtttcaaaatgtcacaagtcgggccacgtaatgaaaatacaactccacggaagcccccgtgtaaccaacaacatatggacactgttagatttacatgacagatcaataatgcagggagcgcaaacaagtacagaaatataaactttcatggggttattggtcttcgatttatactctgaagtttcaatgtgccccagaatatctcatcgtgctctacctataattccgttgcctaaacagcctattgccatgactttcagcccttatactgctacaggcagaatcgctgctcctgtcagaaccttggatcaggcaggtcaaaaatcagagggcagatgaaaaattcctgtgctctatggttcaaatctactcttgtttcccctgcttcctcccgaacggtcgtaccgtcggtgttgcaatgcctactgagtgggctctgcta

SEQ ID NO: 41412 - DNA, 328 bp, Oryza sativa
  Clone ID: uC-osroM202037c08b1
gaggttgatgaggctagctagctagctagggtttcgtgctccccatcgcctcgcgcgcgcagccggatccgatcgggcgtcctcgtcggcgtcggcggcggtgcccctgatatcagtgttgtgattccgttgcaatggcatctggaactgatgagaaagccaagatggagggtttgacatcagctgcagcctttgttgagggtgggattcaggatgcatgtgatgatgcatgttgtatctgctttgaggcgttctgtgagagtgacccttccacattgactggtagcaaacactagtttcacctgcaatgcatttttgaatggagtta

SEQ ID NO: 41413 - DNA, 266 bp, Oryza sativa
  Clone ID: uC-osroM202037c09a1
aaaatatatttttttaaattaattttaagttaaaatttactacttaaaaaaatttttaggaaaaaaaattattccaaaaaatcaattttggaacaaaactatagtcccaaacaaacaaaaaagaagcactggagggggaaaaaaaaaatttttctttaaaaaggaaggcccggggaaaaaaccaaacaaaaaattttagtgtcgaacggacaagggccaaaaaaaaaaaaaatcgggagtagtctctaccaacactggaagaaaaa

SEQ ID NO: 41414 - DNA, 484 bp, Oryza sativa
  Clone ID: uC-osroM202037c10a1
tttgtttgtgactttctgaataatttcttcatactaatataaaggaatacatacactccacggtttagtccatctcatcgccggcatgatctgttctaattaacagatcccaagatgaatttcgccctcggcagaaaaactatttacaaggctcttccgtctctcacaggctactaaacaaaaacacagaggaccaaaacatcggagagaaatatccatcaaagaagaaaataagagagaaactacaaagtcgtcagctaacccatcctgagctagttctctaccggcggcggccggttcagatccagatcgaaagctgccgccttgttcgccgtaaccgctggaggtgacggcgcgagatcaaccaccgacgaggagtcggagtcactttgtgcaaccgccgccacggtgaccggcggtgcaagcttcatcatacggtatccagcctcagctgcggcagccgctgcagcctgctcatagaaaa

SEQ ID NO: 41415 - DNA, 451 bp, Oryza sativa
  unsure (1)..(451): unsure at all n locations
  Clone ID: uC-osroM202037c11a1
tttgtttttaaggaagtggtggtatagttgtagcagtagaagagtacagcaacacacgttaattaatcacgcgagagcgatggatggatcggccggtaaggtctcggtctcgacctcacacgaggcggcggcagatggtgatgccgtcggcgatggcgagctggcagacgtcgatgcgcgggtcggcggcgagcctggagttgaggtccctgatggcgacggagaacctccggtccaggtccgacagcggcgtgtccggcggcagcgccaccgtgccggcccacagcgtgttgtcgtacacgatgtgcccgccgacgcgcaccagctgcagcagctgctcgtggtacttgacgtagttgggcttgtccgcgtccacgaacgcgaagtcgaacgccgtctcgcgccccgccgccgtcttctcggngagcagctcgtccagcttctccagccc

SEQ ID NO: 41416 - DNA, 392 bp, Oryza sativa
  Clone ID: uC-osroM202037c12a1
tttgtttttaaggaagtaagtgggtatagttgtagcagtagaagagtacagcaacacacgttaattaatcacgcgagagcgatggatggatcggccggtaaggtctcggtctcgacctcacacgaggcggcggcagatggtgatgccgtcggcgatggcgagctggcagacgtcgatgcgcgggtcggcggcgagcctggagttgaggtccctgatggcgacggagaacctccggtccaggtccgacagcggcgtgtcccgcggcagcgccaccgtgccggcccacagcgtgttgtcgtacacgatgtgccccgcgacgcgcaccagcttgagcagctgctcgtggtacttgacgtagttggggttgtccgcgtccacgaacgcgaagtcga

SEQ ID NO: 41417 - DNA, 494 bp, Oryza sativa
  Clone ID: uC-osroM202037d01a1
ttttgttttttttttgctatgaggtcaccaaatccattatttataccggtgaaaacttggccctgatttttttccctttttacatagatgaagaaactgaaccagcagaaggcatgtttggatgcgaagaaaaaactaagaactgtggacgaccatgagagccggaacgacccctgtgtccttctcttctaccaaggtggtgtgaccttcccattgcagcggctgctgctaggtgatgctgaacctcaaaatctccaagagcaggatgatgaaatatagttgtatttcgagtttgattggtccttacattcctttcacgctccactgcctcgagcagctcttgactggtaggatccttcaaactgataggctgccaacacataggacactgagaacttttctgacaccattcaagaatgcattggaggtggaactcgtgtttgcaaccagtcaatgtggaagggtcactcttacagaacgcctcaaggcagata

SEQ ID NO: 41418 - DNA, 456 bp, Oryza sativa
  Clone ID: uC-osroM202037d02a1
ggcgtttttctgtgggccagtcgcggctcgccgccacgttcctgccgatgaggaggcgaaccgtctcggcggtccacgcggacgacccggcgaagagcaacgggcccgtgcaggccgtggctaaggcctcgtccccgtctacggtggcggcgccggtgaagaagcctgtggggttggggatgtggacggaggataggtggggggctacaaaggtgcttccgaatttagattccccacaggcaggatgtgctcgtctacttgctgaagacgatcgagacgtttcttgccggacagatcgacggtgaggctcgccaactccaggcgcgccttgactactttgccatggatggtgtttggtcccttcagggttgaaattgcaaccttagcttgaaggtgttgaatgacaacaacatccgtgaggcctcccgtattgttttataaatgggagttgtcatg

SEQ ID NO: 41419 - DNA, 407 bp, Oryza sativa
  Clone ID: uC-osroM202037d03a1
ttttgttttgaccaaatccacgctccttcgttcatttgcaacgaatcagtcatcaaaacgctaaataaacaggcctcgtgtcgtgtcacacgccggcggtcttttctccgccgccgtcgccgtcgccgtcgtggtggtggcggcgcttggcccataacctgaggcggagctcccttccctcgagcatattgtccacctcctcggtggggaggcccttggtctccggcacgcagacgagcacgaacgctagtgccgccacggacagcccgccgaagatgaggaacgtccacgccgccccgatggcatccggcagcgactggaactactgcgccaccggcaggttcgacacccagttcgccgactgcgtcgcgccgcctgacacgctggggtgccgcagcgggtagacc

SEQ ID NO: 41420 - DNA, 524 bp, Oryza sativa
  Clone ID: uC-osroM202037d03b1
gatatatttaagtccaatctattgctcactgcaggtttctgcataatttctatggccaatctgcaggtttctacataatttctatggccaatctgagtgaatcctttaaatcatcacccctttctcttcaatttaccatcagaagttaattgcttgcaaagttgaatttcttctcgaataagtggtctcttgctcactgcaggtcctagttcataattttgcatggccagccttcactgagtgaaatctttaaatccccttattcaattcatcattagaagtactcaccaagggtagaatttaagtgcttggatttatctgcagaaatggaattgcgtaggaattttggagcttcaagatagatgtgactactggagaattctacaaccaaaacatacttttcctagtttgcctaatacttaacttcctgtttagtttctatttcggtcatcagaattgcttcatacatgtagcttagattttggtgtgcctatgtctttctttgttggtcgcagattccttta

SEQ ID NO: 41421 - DNA, 500 bp, Oryza sativa
  Clone ID: uC-osroM202037d04a1
ttttggtgtgttctttctctgggtgttctttcttcaaccttacccttaaatgctcagcaatgaccttctcatgaacattacacattattgtgtccttatcactctcacggatgtagacaagcatgtaggcatttgaatactttgtgaatttaaatggagcgttgttgaaaccaggatttatttgaggcaactgttcagcccaaaagagattaaaattacggaaacaggaaaacaaacatatgtagatcaatatctcatatcattcaatatcaattatcaggtagaacacacctcttcctcacccccgtattgctcttcaagggccttcttagtatcttctttagttacacgctcatcatcaaatttatacctggtagacaggataacattttcaaaaatctataatgaattgggaactgtttgctaggatgtaaaattcaacaagatagttcgccacaaggcataatcatcgtagaattaattataatgcgaggatattg

SEQ ID NO: 41422 - DNA, 429 bp, Oryza sativa
  Clone ID: uC-osroM202037d05a1
ttgtggttgcacataaactgcggatgaaaaccatctggtcactttatacaagccgtacatcagctaaaagaagttcacgatgcctcagggctgaggcagacagaaactgaaaacgacgcagcaagttaaaaacaaattacaaaacctacatgagacaaaattaaatcgtagagatagtgtcccactaccaccaaagcaacattatttgcagaggttcctttttttcagcccacatgatcccgtggtctagttattattggaaaatctccgttcgtcctgaaattcgatcgaattttaaatctctctctcctagaagagcttgaatagaattcctccgtgcgtggcgaagaatggcgcgaacaccagcgactcgacggtcatgagcttgatgaggatgtacagcgacgggcccgacgtgtccttgagcgg

SEQ ID NO: 41423 - DNA, 468 bp, Oryza sativa
  Clone ID: uC-osroM202037d06a1
ttttgttttttttaggccttgggagagcatgcttgatgcattgcatcagagcttccaactatacagttccagatccttttggctgagtgtaggaaacatctgctgagaacacacagattattattagggtatgggtgaaaattattatctattattgagcagggggccaaacaaataaggacgccaaggagaatggagtaaccagcataagtggatctactacttgagactggggtcatcttgtgttaaccgaacacaaactaccattccaaggagaataactaagtttgcttgaacatctcaatcgagtgtctgctgtggcttcaacggggaaaatgtgcaggcttcggacaaactaaaacaatggctcgtctctgtgtacatcatcacttcaatgaagctggaagcctgctgaggactagacttccatggtgagactaatgagcttaccagagaaagctcatgcag

SEQ ID NO: 41424 - DNA, 497 bp, Oryza sativa
  Clone ID: uC-osroM202037d06b1
cttccaccgtgttcttcctcctcccagatctaagatccgtggaccgaccgagctcgagctccaccacctcgtctccaatggcggtcaaggtctacgtcgtgtattactctatgtatggtcatgtcgccaaactagctgaggagatcaagaaaggtgcttcatctgtcgaaggcgtggaagttaaaatatggcaggtccctgaaaccctctcagaggaggtgctgggcaagatgggcgcgccgccgaggagcgacgcgccggtgatcgcgccgcaggagctcgcggaggccgacggcgtcctgttcgggttcccgacgaggttcggcatgatggcggcgcagatgaaggcgttcttcgacgccaccggcggcctgtggcgcgagcagagcctcgccggcaagcccgcgggcgtcttcttcagcaccggcacccaaggcggcggccaggagacgacgccgctcacggcggtgacgcagctggcgcaccacggcatggtg

SEQ ID NO: 41425 - DNA, 488 bp, Oryza sativa
  Clone ID: uC-osroM202037d08a1
ttgttttttttttttttttggtttaagcctgggttaaagaattcagcaactgagcacgcgtccaaacaaatattgattacactttgtatcttcaaatgccatgtctgcattgaatcaacaagggacatatataaaaccaatgtctgaaaagcattaactaacaaagactaacaaaagaagtcagggaaggaactccaagcatggttccgaaattagctactccacaagccatatatatacttctaattgttggagaagaagcagataagtcttgttggacagatgaagtgtgcacatgaagaaatccaaacaaaagggtaattttttccaatgcatgatctttggtccagtcgagcttcaactccaaaccttaacttgtagatattgaatgacagcaaatccaatgagggaaccactattgataaataacacggacttcccatgaactaaccaaacatagatcccttttcaactccaacatccaccct

SEQ ID NO: 41426 - DNA, 481 bp, Oryza sativa
  Clone ID: uC-osroM202037d08b1
aaccaagcaaaccatctagctttattttctcctgtccccaaggccaaacagcacagagctgaggcccccttaaaaattcatcagaacacatccatcaaaaaacttattacaacacggcgagtatatatgctaccatatcctcgacaactgcctatagtgccaagaacactcaacaaccaccatacaaacatttgacagaacacatgcagatatcaccgccggcgagttgaaactattctaccccctcctcccagattcttttcccttcccccgtttcagcagtttagaaagccaatgggggcaatggcaggttgctgttgaccccggaccgcatcctcctccgcctcagtctctcggcgatgatgaaggcgagctccagggattgcgacgcgttcagccttgggtcacagtgggtgtggtagcggtcgctcaggtcatcgaaggtgacggtcctggatccaccgatgcattcagtcacgtt

SEQ ID NO: 41427 - DNA, 474 bp, Oryza sativa
  Clone ID: uC-osroM202037d09a1
tttgtttgttaattttttttatttattaattttatatatatcaaatatttttaacatctgtatatgttaaaactttttcacttgcatattctaagttataacctcatttatttaatgttaaaacttgtaatgatattggcataaatccatgttctattccacataattcactacacataccactatataaacctaattttgatgctataacagtttttaaatttattctaccaggtattgcatctatttttaaacctaaaccttgaattgctcagctatgtgcaacatcattagatgtaataaaaaaagaggtttttaaccctactggtatagatacagcatttgttgtaactaataaacgtgtataacttttactttgtttatccatttcatcaattaaaactaaattactaacttgttttaaagctcccattgctgatttaattcataagttccatatcattgattacctat

SEQ ID NO: 41428 - DNA, 371 bp, Oryza sativa
  Clone ID: uC-osroM202037d09b1
atgtgtttgatggatgaaccttcagagagtgcttctccctctcatggaggaacccttatgtacttaggctcgccttctccgccggcatcggtggccttctcttaggctacgacaccggtgtgatttcaggagctctgctttacatacgtgacgatttcccttcagtcgacaagaacacatggcttcaggagatgatcgtgagcatggtggtggacatcgcgatcatcggggcggcgatcggcgggtgggctaacgaccggttcgggcgacggacgtcgatactggtggtcgacgcgctcttcttcgccggtgcggttgacatggagtgggcgacggggccagcgcatttggtggtgggggaggggtttgac

SEQ ID NO: 41429 - DNA, 494 bp, Oryza sativa
  Clone ID: uC-osroM202037d10a1
gcactcccttgagcactccgtgccgcgccggagctcggccacgaggcgcaccaccgcgccgtcgatgttcacgatcgcctccgcgccgccgcgcttggccagcgacgccagcaccgccacggcggtctcctcctcgctgatcgccgacagcgccgcctccgcggcgccggcttccacgagcttcccgacgttctccctctcgccggacaggcacaggagcgcggcgatcgcgtccttcttggtgctggaggggccggtgcgcacgaggtgcacgaccctctcgacgacgcgtgggttccggccaagccggcggcggtaggaatggacggacgccaggctgagcacggtggccgccgcgttctccttggcgcgccacgtcgcgccggagcccatggcgtggcagatcgcctcgacggcgccctcggcgtgcatgatgcgcttcttggtggcgtcgaggatggacaggttgagcagcgccgtgacggcgttgagct

SEQ ID NO: 41430 - DNA, 483 bp, Oryza sativa
  Clone ID: uC-osroM202037d11a1
tttgtttgaatatagattatgtgatggtataatatcgatgggagtgcacaatcaacttaacaagtttatacaagcacagtacgtagaatcaaacccacaaccaaatccaaccaaatctttgtgtaacgaatcggtaaagattaattccggcatatgaacacggatcaaatcagcacaggcagccaatgcgaatgatctctgtaacaattctgtatatgattcaggcggaggaggcgcccttgagcttcttggcgatgccagcgaagtacttgccctggtggaaggcgtgctccagctccgcctccgacggccacctcgacccgtcgccggcgaacgtgccggcgccgtacgggctgccgccgtgcaccgccgccatgtcgaacatcttggcgccgaacgtgtagccgaccgggacgaacaccatgccgtggtgcgccagctgcgtcaccgccgtgagcgggtcgtctcctggccgccgccctg

SEQ ID NO: 41431 - DNA, 545 bp, Oryza sativa
  Clone ID: uC-osroM202037d11b1
gctgtagttccgaattcacatcttgttacgtgtcgagttacgtgcgaaacagaaacgtcaggctaaccaataactggctcaagcgctgagggaaccagtcggctgctccgctgtcgcactctcgaccgatcagtcgttcgttctatttctcgtatttgccttcgtactggctgtcgccgatcgggggatgcattccatctcgtactcgcttgcgacgcgtgtctggcgacgggtatcatggcttgctggccggtaggacgctcggctacgcgtttctatggagcacaggacttatgacgcgcgactccactgatcgcgaaggttgtagggctcaacgaccacaacctgctcgcaagtgcgcgctgatacagaacgccatccttgaaggagcaacatcgttgcttttcaccgaataccaatacgttggcgttttcatgtggatattcgcggaggtgatcttccttttcctcggctccgtcgagggattcagcacaaagacccacccctgcacatacagtaaggacaaggagtgtaagcctgctctg

SEQ ID NO: 41432 - DNA, 445 bp, Oryza sativa
  Clone ID: uC-osroM202037d12a1
tttgtttgaatatagattatgtgatggtataatatcgatgggagtgcacaatcaacttaacaagtttatacaagcacagtacgtagaatcaaacccacaaccaaatccaaccaaatctttgtgtaacgaatcggtaaagattaattccggcatatgaacacggatcaaatcagcacaggcagccaatgcgaatgatctctgtaacaattctgtatatgattcaggcggaggaggcgcccttgagcttcttggcgatgccagcgaagtacttgccctggtggaaggcgtgctccagctccgcctccgacggccacctcgacccgtcgccggcgaacgtgccggcgccgtacgggctgccgccgtgcaccgccgccatgtcgaacatcttggcgccgaacgtgtagccgaccgggacgaacaccatgccgtggtgcgccagctgcgt

SEQ ID NO: 41433 - DNA, 229 bp, Oryza sativa
  Clone ID: uC-osroM202037e01a1
tttttgtttaactgataggaggaaaacatatttataaccgcatctatctaaggacatggaactattagcaatgcttataccccgaaatacagttttactacaatatcttaaaaaagacgttagttttacctcacaggatggccagttgagcaaagctgttgacacaaaaaacactggatccctttgaaccaaaccgcatccatcgatgaagacacagggtactctactg

SEQ ID NO: 41434 - DNA, 474 bp, Oryza sativa
  Clone ID: uC-osroM202037e02a1
gatgaaaaatatttttaacggttttcaacttcttccatgtcactatcgatgatgcttatttattgcagttttttttcactattttttccccatatatatgtcactgtaacaaaacaaaatgatcgattgattcatcatctcggattgtaatcagctgcatcccttggcgccgaagccgatcctctggttggcaacgtcgtacgcgacggcgaacgtcttctgctgcgtgttcccgaggatggcgatggacgagtcgtcggcgttgggcgcgaacgccaggcacgcctgcgacaccttggagacgtagagcacgccggtgaagtcgaggctgacggtggcgccgccggcgaacgccagctccaccgtgggtatctgcgccgtccggtggccggtgaagccgtagcacgtgtcgaggatggacagcgcgggcgccttcttgtactgcgccatggagcgcgcgaacgccgcgccgag

SEQ ID NO: 41435 - DNA, 504 bp, Oryza sativa
  Clone ID: uC-osroM202037e03a1
gttgatccttgcttggccacgaaaagagaccgggtttaggcctttttttttccactgggcatttggacagctcctattaacataggggtttaagcatagaagaaggggaaaaaaaacaatacgatatctgcagcatgtgatgtttcgcactatcacccactcgagcgcaaagccaacttgagtttggcagcagtacattagacagtgggttgctttatcgtcaattcagctctcagatgcaacacgccgtcgaggaagaagaggctgtcgtcagccatgaacgtcgaccatggtatcgcaaagagattcctgtaaccaaccgccttcccaccggtgaacgtgtagttacccttgtacttgctcacaaactctcctgacggtcttgtccttgcagcaaactcataatctactgtcacgctcattgagcccttctcttgcatccctaagaagagaccgaagcagtagaacgtactctgctgttccatgttacagtgtgctgagagc

SEQ ID NO: 41436 - DNA, 488 bp, Oryza sativa
  Clone ID: uC-osroM202037e04a1
tttgggttttttatttttttgggagtaatacccgcagtacaacatccacaaatttcacgccacatatcaaccattctatacaagtgacaactatcgtagtgtcatttccaatttcgttcaataaaaacggggacatgttacacaacgatttccctctcccctagtatttattattcatgaaatctgggcggcatcctgatgacgcgagactacatccttgctctttgcagctccagcttagcgattgtcccaagatgaacttcatcagggccgtcggcgatcctcagtgtcctagcagttgcccatagatgtgatagaactgtgtctgatgagagaccagcaccaccatgaacttgcattgccatgtcaagcactttcagggccatatttggagctgccaccttggccattgcaaggataccacgagctttcttgttcccatgtcggtcaagttgatcggctgcttccagcaccagaagtctagcctg

SEQ ID NO: 41437 - DNA, 169 bp, Oryza sativa
  Clone ID: uC-osroM202037e04b1
tggataagatcgcgagcggccgaccataatttttggttttttgaccatcaaaaggccatcgaattcgtagtctacggcgtgctaaggatggaaaagtggttatactgctgctagagtgctatcccgaatgctaccggaatccggtgtttaatctgaatgtagggtgatg

SEQ ID NO: 41438 - DNA, 478 bp, Oryza sativa
  Clone ID: uC-osroM202037e05a1
tttggtttttttttataggagcgaaacatttctattaccacaactttttaaggatggaatcgagtagcaatactttcaccccaaaatacagtttagcgacaatatcttagaaaagccgcttgctttgccgccatggctggcaagctgagcagagcagctaacacaaagaacacgagatcactataaaccaaacggcaacgaacgaagaaaatacagggtcttttttgtctgaagatacacgaagcggctcgttttcttttatttttagtctcctctcctgctcgatgatgggtgtatggcaatggcaatggcgatgggatcttggcttagctgatgggaaggggctcgccgatccactccttgaggcagtcgagcatggggtcgatgagcttgccctggctgatgccgaggaacaccttgatgcactcctcgccgggggacttgagcttctcgccggtgaggaatacgcagccgagct

SEQ ID NO: 41439 - DNA, 356 bp, Oryza sativa
  Clone ID: uC-osroM202037e05b1
ggaagaaaaaggacagataacgaagaaaagctgtggaatactttacagagcggggagttttgcgtggaaaacttacagggttgtaatccagtattgtaggcaagaaacttgcccacctttatctgtacatgattatcagatccttcttcattgaagtcagatgataaatttgaaggaccgtattagtgaagtcctcctagttagtactcaatccaattagcatccagatccttcagcttcaggagccatttctgtttgtccggagaaacgcttggtttgtttggcttgcttgcgtgtttatttgttatggcatatgaggatccagccttactttcattatcagagttggctcgcct

SEQ ID NO: 41440 - DNA, 476 bp, Oryza sativa
  Clone ID: uC-osroM202037e06a1
ttttggtacattcaactgatcacagccggcctggagttcattcctgcttgaacaacaaaggtacagagatcatactacacacccagaacactgaagcacttgccatgcaggcagtacttctcttttatgaaaagatgatacagatcagttgcaactatgttacaccaccaccatgtacaacgaccggacaccgaaacatcatcctagtgcagagctgtgaggattgcagtggcgctctcaaccttgaaggttgcaccacagatctcttcttcatttgcaggaacagcagtcaccttgttctttgggttctcatagcacttcaagcctccaagagcattggaatagaagcaaccttgtgggaaaggtgcaagtgacttgccacatgatcctttaagcaggtcaatgtcgttagagaaggcaacagatccatcagcagttattccccagaacagaggcaccttgccctctggatcaga

SEQ ID NO: 41441 - DNA, 474 bp, Oryza sativa
  Clone ID: uC-osroM202037e07a1
tttgtttaactggttggcatgaaaaatatttttaacggttttcaacttcttccatgtcactatcgatgatgcttatttattgcagttttttttcactattttttccccatatatatgtcactgtaacaaaacaaaatgatcgattgattcatcatctcggattgtaatcagctgcatcccttggcgccgaagccgatcctctggttggcaacgtcgtacgcgacggcgaacgtcttctgctgcgtgttcccgaggatggcgatggacgagtcgtcggcgttgggcgcgaacgccaggcacgcctgcgacaccttggagacgtagagcacgccggtgaagtcgaggctgacggtggcgcctgcggcgaacgccagattcaccgtgggtatctgcgccgtccggtggccggtgaagtcgtagcacgtgtcgaggatggacagcgcgggcgccttcttgtactgcgccatggagcgc

SEQ ID NO: 41442 - DNA, 505 bp, Oryza sativa
  Clone ID: uC-osroM202037e07b1
tactttctcctccggctcttcttcagtatcgaatcctctcttctcctcgtgcccaccaccaccaccgtagcaatggcgggcaacgggccgatcaacaaggaggacccgctcaactggggcgcggcggcggccgagatggccggcagccacctcgacgaggtgaagcgcatggtggcgcagttccgcgagccgctggtcaagatccagggcgccaccctccgcgtcggccaggtggccgccgtcgcccaggccaaggacgccgccggcgtcgccgtcgagctcgacgaggaggcccgcccccgcgtcaaggccagcagcgagtggatcctcaactgcatcgcccacggcggcgacatctacggcgtcaccaccggcttcggcggcaccttccaccgtcgtaccaaggacggtcccgccctccaagtcgagctcctcaggcatctcaacgccggaatcttcggcactggctccgatggccacacgctgccgttcgagacggtgcggg

SEQ ID NO: 41443 - DNA, 482 bp, Oryza sativa
  Clone ID: uC-osroM202037e08a1
tttgttttttaattttttgggttttttttttttttttttttttttttttttttttttttattttttttttataaaattggtttaatgtataaaataagggttaaaaaaataattctatattagaaaaaagggaagaaaaaaattattacccacttaaacaaaaaaacaaatagagaaaggcagcaggacaaaaaaaaaagagtatgcttatcgaaaattcaggtttgaaaaacaaaacgtcggaaaaaaaaaaaaggttgacgtcagccaagaacgtttaacatggtatggcaaagagaatcctggaaccaaccggcttaccaacggggaacggggaaatacccttgtacttggtcacaaactctcctgacgggcttgtccttggagcaaactcataatctactgtcacgctcaatgagcccttatattgcatcctaaaaagagaccgaagcagtagaacgtactctggtgttccatgttac

SEQ ID NO: 41444 - DNA, 494 bp, Oryza sativa
  Clone ID: uC-osroM202037e09a1
ggtggatccgtgcttgccgacggcgacggtctcggagtgcgcgtggtcgtggcacttgcgcttgtggcctgcgccggctgacatggcggcggaagcagaggacaggggtggatagaccaatatggtcgccggcggagggggaagcatcaagtaggacgacccggagcccaaagccaagtacaggctggcagcagcacataccaaagagaggaaggacaagctcaatgcagatatgacagacaccatgcacccggggaacaagacgcacccggacgccatgaacgtgaaccatagcatcataaagagagacatggaaccaagcgactacctaacggggaacgggtagtaacccttggacttgctcacaaactctactaacgggcctggccttgaacgaaactgataatctagtgacacgctgaagaagaccttctctagcatgcctacgaagagaccgaagcagtagaacgtactcagctgttgcatgtgacagt

SEQ ID NO: 41445 - DNA, 470 bp, Oryza sativa
  Clone ID: uC-osroM202037e10a1
gccgccaccggggaccactggggcgctgggtaccacggcggcggaggcgggcgcggcgggaagagcgccgcgggccccggcgtgcagtgcgacgtggacgtggtgtcgtggcgcgagcggcgggtgttcgcgtccgtggcggtggccgccgacgtcgacaccgtgtggcgcgtcatcaccgactacgagcggctcgccgaattcatccccaacctcgttcacagtgggaggattccatgcccgcatcagggccgagtatggctcgagcagagggggctgcagcaagcgctttactggcatatcgaggcacgcgtcgtgttggatctcaaggaggttccggatgctgttaatggacgagagctccacttctccatggttgatggtgactttaagaagttcgaagggaaatggtccatcagatctggtccacggtcatctagtgcaattttgttgtatgaagttaatgtgat

SEQ ID NO: 41446 - DNA, 461 bp, Oryza sativa
  Clone ID: uC-osroM202037e11a1
aaaccatctggttttccctcttattattactgtacatctgccgaaagaaatcctttcttgcagacgacgaatcaacaaattttacagcggaggagaggagatcgtatcatctcgctgccaccagcggcagcgagggtgtcttgttgctgggcatgtccatgtcgagctccaggccgaagagcacgccttggtaggcctcgacgccatgcttgaggaagtagagctcccgcatccgccggaagacgtcccaggtgagcaagctgtcggaggcggcctggtggcaccgccccgccgcgcgcttcacctgcagcgccgccgacacgcgctccagcccgccgtacagctcgccgccggagtgccgcatcatgtgcttcacgtcgtacacctcgtcgccgaagaagacgcgcaccaggttcaggaactcggccatggacctcggcagcttccgccccatgaggagc

SEQ ID NO: 41447 - DNA, 520 bp, Oryza sativa
  Clone ID: uC-osroM202037e11b1
tccggttcttcttcagtatcgaatcctctcttctcctcgtgcccaccaccaccaccgtagcaatggcgggcaacgggccgatcaacaaggaggacccgctcaactggggcgcggcggcggccgagatggccggcagccacctcgacgaggtgaagcgcatggtggcgcagttccgcgagccgctggtcaagatccagggcgccaccctccgcgtcggccaggtggccgccgtcgcccaggccaaggacgccgccggcgtcgccgtcgagctcgacgaggaggcccgcccccgcgtcaaggccagcagcgagtggatcctcaactgcatcgtccacggcggcgacatctacggcgtcaccaccggcttcggtggcacctcccaccgacgcaccaaggacggtcccgcccttcaagtcgagctcctcaggcatctcaacgccggaatcttcggcactggctccgatggccacacgctgtcgtcggagacggtgcgggcgggcatgctcgtgcgcatcaacac

SEQ ID NO: 41448 - DNA, 303 bp, Oryza sativa
  Clone ID: uC-osroM202037e12b1
cttgctccatccatctatccatccaaggagtgtggaacgccacacgtattttttttttatctatgctaatctgatcattagcagaggagagttttagcagtaggattggattaaattggagtagtttcatagtttgtgtgtagtgatcttaattagctttgattagacagacagtacagtagagtagaggatgttggctgtgttcagcggcgcggtggtggaggtgccggtggaactaataggcagcctgcgcccgccgcggagataccaccacgtgtgcgctcacaactgggaggacgaatt

SEQ ID NO: 41449 - DNA, 388 bp, Oryza sativa
  unsure (1)..(388): unsure at all n locations
  Clone ID: uC-osroM202037f01a1
tttgggtttttttttttttgggggaaaacatcgaagtactttttcatatagagtgcatacagttttttggtaccatatgcacacagctcgcatatatacatacagacacatacaaagttaacatgaaaagcacacctggaagaaacattgagnaaacaattatgcagcataggtcaggaatcacagaagctgaagatgatcaagaagtttggtgacgcagatagtcaaaaaccgaggataaactagctatggtaggcaaacgaacagttagctgatcattaacagcgagctgaccggaggccctctttgatatcgatatatctacacttgaatgccttctgacatgcatccagggggaggtgattttacaccccaaaggaggaggaag

SEQ ID NO: 41450 - DNA, 131 bp, Oryza sativa
  Clone ID: uC-osroM202037f02a1
tttgtgtttaggttatagggaggactaaaagccacaaatcacacatgacgtatgttaatacaggtagcacaggaactcgctatatgtagagacaccaggacctaaggtagctcagacatagctggactctg

SEQ ID NO: 41451 - DNA, 391 bp, Oryza sativa
  Clone ID: uC-osroM202037f02b1
ctgtattttttgaccagggcggatgaggagtcggggggtgatatattcgttaccgccactggggatacggatataataagggaggaccacatgaggaatattacgaacacagcactaggtcgtacgattgagcagtctgatactgagagtgatacgcttcggccagggacctaccctggtgttaagcgcatcactatcaagcctcagatcgaccgctgggtcttccctgagaccaacactggcatcattgaccttgctgagggtcgtttcatgaaccttgggtgcgttactggtcaccccagttttgccatgttctgtttattcactaaccaggtcattggttatcttgagctgtggaaggagaagagcactggcaagtacgagaagaagg

SEQ ID NO: 41452 - DNA, 422 bp, Oryza sativa
  Clone ID: uC-osroM202037f03a1
agaactgcgggggcatgcgcgcgcgcgcgtgcgcggggcctctttagagcgcgcgctcttttttttttgttttttggaaaatgccggggtggatgaaaaggagtttgaaaggcatatttgacaataattacaacattagctggctgacagtgcgacagatttttttagctaaagagaaactaaccgatgtgcctatgatccaaccacatctttatgaaagtgagaggatgaacttccaaagaaaaggtaggtatacatacacaacactacatggaagggcgagcctgccctatggggctttgctacaactgcaaggcttgtaacctcggcaccagaatggatggagctgcttgctgaacccgcttgactgggcggagaaggaagttgctggtgcccgattctcggaaccaggttatcaccac

SEQ ID NO: 41453 - DNA, 377 bp, Oryza sativa
  Clone ID: uC-osroM202037f03b1
gcggcgcgccagccaatgaccataaacccgtcccagtcccagcgatggatcagcgcaagggcagtggaagcgacgccaacggcggactggcggaggcgacggagtataggctgatgttctagtactattgctagggtttggatgatgacctaccctggtgttaagtcgcattacaatgaagccgtagaccgaccgctgggttaattccttgtgaccaatactggcattattgtccttgctgagggtagttttatgaatcttgggtgcgctactggtcaccccaggtttgtcatgttttgcttatttactaaccaggttattgcttagcttgagcttgtgaaggagaagagtactgctaagtaccttaagaaggtgta

SEQ ID NO: 41454 - DNA, 466 bp, Oryza sativa
  Clone ID: uC-osroM202037f04a1
ttttggttcaaacatataggagggactgaatcagtctttattatctctttcccaagacacagcaaggtatattttcaggattccagatacagtttcacaacttgcgtcaccagaatacatatcaccgtataacattttattcacgactacggctggtcgacacattacagttcatgtttgactgtccaacatagcaccaccactggattcctcctggccgatctacatgtttggtttcaggttgagacgtgaagccagcttctgcccaagggacgcatcacactgcgaccagtaggagatccagatgccacggagttcatgtgtaatacgaggatctgagagagcatcaacccaccgctggagaaaacgatcttgcctggcagggacaaatgaccggtatatctcaccagcctgtttgaaattgttttccttgcaatgacacactttcccgacagcctgttagaac

SEQ ID NO: 41455 - DNA, 529 bp, Oryza sativa
  unsure (1)..(529): unsure at all n locations
  Clone ID: uC-osroM202037f04b1
cgaagccagaggcgttggtttggcgacgagctcgacggagagaacgacgatgagctcttcaatccctggccaccgtcttcaatcgtcgccgtcccgcaccttcttccgccgccggccaccagatccgggagggtagccggtagcgagcagtggggaaagagagggggctgcagcggtgaccagcgcagcgagtggaggacggtggcagccagcagagcgggtggaggacagcgacgaccagtgaccggcgcagcgggtggaggacgacgacgaccggtgcggaggaggagggttgcggcgatgaccagcgcagcgagtggaggacggtggcagccagcatagcgggtggaggacgacaacgaccggtgcggaggagggctgcggcgatgaccagcgcagcgggtggaggacggcgaccggtgcagcaacgattagtgcggcggcgggaggatgacatcgacgagaacgagatgcacattttttttcttttctttctttntattnttttccctcacctgttatagcgtat

SEQ ID NO: 41456 - DNA, 380 bp, Oryza sativa
  Clone ID: uC-osroM202037f05b1
gtcaagtcttatctgccttcctccctcctctcgccttccgcctcgcgtgcgctccaccaccgaaaaaaaggacaggtattcccctttcctctcttcctaatcaggtgcatgcatgtctcagatttggggatctctgggtgttcggtcgcatctggtcatgaattttcgatcggttcgataggtcgttggtcccggtgaagaaacggatctcgtagcttcggagttgttgcgtgggtgtggaggttttgggcggaacggatttggtgcgattttgctttgattcaggggtgtttggggcgtcggaggaggcgtagatgggttggatgtgttcgtttgggggtgatgggtggtttgatttggggggatttggtgtgtttcat

SEQ ID NO: 41457 - DNA, 442 bp, Oryza sativa
  Clone ID: uC-osroM202037f06a1
ttttgtttttttttttttttgggttttttttttttttttttttttttttttttttttttacaacaagggcttttcaattcatcgggttaaggaagaaggggccctaccgagataccagggggcatttactaaaacaatttggttgggaacaagcattaacaattggaggatttcatgacccaaccattaccaagttaccaagatgggatttattgttcggaaagggttagtttttgtttgcaaaaactttttcttttccaactggggggttctttacacttttacaggacatgggggccaaaaaaacggaagcaaaaaattggaaaccagctgcaaagaaggggaacccccaaaccaagtggccggtgacacccaaaaaataagaggggggagaagccctcctttacaaaaagggcgaagaggaggaccaccaaaccggggg

SEQ ID NO: 41458 - DNA, 442 bp, Oryza sativa
  Clone ID: uC-osroM202037f07a1
tttggttctttataaaaggggggaaaacattcacaaactacccaatattgagagcatacagttttttggtgatatctgattagcggaggcaaatatacatacgggcacatacaaaagctgaatggcaggactacttggaagaaacatggggcaagcgggcacgcaggaaaggttaggaatttcagaagctgaagatgatcaaggatctagctgactcaaaaagctagaaaccgagggtaaactagatgtggcaagcaaacgaacagatagctgatcattaacagcgagctgaccggaggcactttttgatatccaaacatttacacttcaatgcctccggtcatgcatccagcggcggcgttgtttagcccttaaagggggacgaagagtcgagcttggcggacctggccctcatgccaactggtggaaggcggcggccatg

SEQ ID NO: 41459 - DNA, 454 bp, Oryza sativa
  Clone ID: uC-osroM202037f08a1
ttggtttattttctacttaggcttagatcccaaagaacataaataacgtatgttaatacaggatcacgggaacaagcacagtttgcgaaacaagatacttggtcaaccaaaatttaatggattgcagggcagctgagctcgcattgatcaccgcatcttgtagtgttgtgttcttgacacttggcatctatgcccacttagggcgtagcagagcttaatgtcaatatctgggggattctttttattcggtgtaacagtcatactgcctgtgatggtttccccctcacagatggtcagtacattctccaggtacagaacagtttggttcccgtgagtggcttttgatcttgggcctgttgagaagcccatcatcttatggcatttggtgaaggacacattgaaataggcaacaagagcatggatataggcattacgctctgctactaacttaaat

SEQ ID NO: 41460 - DNA, 489 bp, Oryza sativa
  Clone ID: uC-osroM202037f09a1
ggaacatgccggggggcatctgacccctggcttgctgaatctctcaccatatattcggcattaaaaaaagaacaaacaacggcatttcgaactcatctgaacagcaaaacatgtttatctcaactgaacgatcctgaaaaatagccattgcccaattaaccaagcaaaatcttactactactccatagtctgatctggtgacagtatttaccagagcacgtttattcagctctagaacacatcacagcctcaccattcaacatgaaaggaactctgttactacagtctatagctgtgccaagttgttactacctgacaaacagtgcaaggccaagactcatatatgttacctaaaaattgcacactatgttcgctatagaagcttcacacatgaaaacgacaacactactctgcacggtccaccattgttgccatgatttattattcaggaaaagaagcgaacacttgagagagtaggcaacgaaccga

SEQ ID NO: 41461 - DNA, 474 bp, Oryza sativa
  Clone ID: uC-osroM202037f10a1
ataggggagtagcaagtacttttattagattgacaatatcccagacaaaccatactcataatatgccggtagtgcataatgaggacacaacttgcatcaagcaagaatcgctttaatagcaacaaatagtcttatgacttcaaatatagagaacagtaactggtagcttcagaggcttcccaatatctggcagcacacgatattgcatacgagcatctataggcagcttagaaaccgtgaatcttgatgttgtccttcttagcaatcccagcctgaactaggaacgtggcaacattcttacgctgatcaccttgaagctgaatgacctgcaaccacaaatttacgttaccagcacatcctcatagcagaaaactgagaaccagttaagcattgctaagtgcatacctggccaagctctggatcttggactacagtaccattgcagcagaactcctttttcagatccttgaggat

SEQ ID NO: 41462 - DNA, 508 bp, Oryza sativa
  Clone ID: uC-osroM202037f10b1
tttttatctctcccacaacaaatcacgccatggatccctacaagcatcggccgtccagcgggagcaattccaccttctggaccaccaactccggcgcccccgtctggaacaacaactccgccctcaccgtcggagagcgaggccctatcctccttgaggactatcatctgattgaaaagcttgcacagtttgacagggagcgtatccctgaacgtgtcgttcatgcaaggggagccagtgccaagggattttttgaggtcactcatgatatttctcacctcacatgtgctgattttctccgtgctcctggtgttcagaccccagttattgttcggttctccacagtcgtgcatgagcgtggaagccctgagacattgagggatccacgtggttttgctgtcaagttttacactagagagggtaatttttgatcttgttgggaacaatttgcctgtcttttttatccgagatgggatgaaatttcttgacatggttcatgctttcaagc

SEQ ID NO: 41463 - DNA, 347 bp, Oryza sativa
  Clone ID: uC-osroM202037f11a1
ggaagcccaagcaaaggacaagccccttttttattaaaccccggccgatttggccaaaagcttaatccttccggggggggataaaccaccgggcttattatcttaccaaaaaaaacaaagggaaaattaggggcctttgatctttttggggaccgggcaaccctggaacccggaaaaaaaaaaaaagcctagaatgactggccgggcttttttttaaaaaaaaacttggattattctttttaccggagaactggaaacccgggaccccccccaggggatcccctggaggggcccctctttccccggtgggggtatatcccaaccccctaagaccccggggggaaaaa

SEQ ID NO: 41464 - DNA, 260 bp, Oryza sativa
  Clone ID: uC-osroM202037f12a1
ctctttggcttctagcagcaaagggggcacgagttggggttctcctccatgctcatgttgcggacgtagtagcactgcggcggcggcacgtacgggtaggccggcagtggcggctgcggccggtgatactggttcctggactccctgtggaagccctgccccgggaggtggattatccatgaaaacctgggcacctgctgccagacccgagactacatccttgccttcggcagctccagcttatcgattgttccaaggtg

SEQ ID NO: 41465 - DNA, 521 bp, Oryza sativa
  Clone ID: uC-osroM202037f12b1
gttgacctcgcagctttaatccccgcccccagcctctgtcccgtggactcgcagcagcacacggcatccgtagccgagggcggagcagggatcgacgagcggcgaggaggcgggcgagcggctggccggcatggaccggaatctgagcgggttcctgatcgggtgcgtcggcgccgccgtgacgctgctggcgtacgagcagacgctggtgtcgagcacgcagtgcatcgccgccggcttcgtcgtcctcctcttcgcgctcttcgtcaaggagggcttcatctcgctctgattttctgcgtgtcagcggcgacttggttggggggttccccttctctgcagctcgtttccgattctttgcttccgtttttctggacctcatgtcctgtagaagtgtagagtagccactagttggaaaaggaatagcttttgcagcaaaaactaatcctttccgactatgaatgccatcttggtgacttggtgatggttgggtcatgtaatcctgcaattgctgatgcttg

SEQ ID NO: 41466 - DNA, 323 bp, Oryza sativa
  Clone ID: uC-osroM202037g01a1
tttgtttttttattttttgggttttttttttgcgcaattgattttattttcaccatgcattcgtcaaataaaaacagccttcatcacaaaggggcatactcctcgtattaaagatccaacaggttaagggaacacccgagcttcaaactccacatgaccaaaagtggaggctgacaagggggtacctaggccactcatacggcggaggacatcttcatggaatttacgagctccctaactcgggatgacccgggaagggactttctgttagaaaagagaattctgttttcacaaaacccatgcccacaaaaaagggtatgaac

SEQ ID NO: 41467 - DNA, 359 bp, Oryza sativa
  Clone ID: uC-osroM202037g02a1
tttttgtttttttttgtctggtgtgttatatgtatttagcaataaactcatgcgtctcagcttcgagcatgtgcggactgtttaattttgcatgccatcgttaacaactctctggctccaaactacatggggctacgaacattagaagttcatgcaacctaattggatccaagttatatggaccctatagatttattggaagctaatagaaatggccgggatggggaacacgagagcgtcgcaagagcttgtgctcgattggggttaagcgtaccaagccgccttcacagacaccgtctttagtgcctgggctgttaagcgcttgaagttcacctgcatgttactttgggcccccctgc

SEQ ID NO: 41468 - DNA, 355 bp, Oryza sativa
  Clone ID: uC-osroM202037g03a1
tgcagcgcgtacgcatgctcgggtcctctttagcgggcgcggcgacggcgccgggggaacccacattgcggtgcgccgccgccgatggggcggctagtagcgggacaacatctggcgctggtgctggaacgggaatcaactcgaactcggtgctggtggcgctgctggactcgcattacacggagctggcggagctggtggagaaggccctgctgctccagacgctggaggacgccgtcggcaagcacaacgtgaccatcttcgcgccgcggaacgaggcgctggagcgtgacctcgacccgtagttcaagcgcttcctgctcgagccgaggaacctcaagtcgctccagtcggt

SEQ ID NO: 41469 - DNA, 356 bp, Oryza sativa
  Clone ID: uC-osroM202037g03b1
taaaaatctaattaaaatcccctcccccaaaaacccctctcacccgaatttcctcatggactcggtgccggccgccggagtcggcgtcggcggcggcggcgcgggcgcgggctacccggagtccacggagtcatccccacgcagccggggcggcgactcgtgggacgagcccttcccttcctccgccgcggcggcggccgcggctgccgggggagggaggctccgcctcatgtgcagcttcggcggccggatcgtgccgcgccccacggacaagtaggtgtgctacctcggcggtgagaccctggtcgtggccgtcgagcggaacgccttcgctggccgacacacacacgcggtta

SEQ ID NO: 41470 - DNA, 487 bp, Oryza sativa
  Clone ID: uC-osroM202037g05a1
ttttgttttttttattatttaggctgggcagaaatcattaataccaaggcagaatgcccagcccaaaaccaatacaagagtgccaataataattaaacaaactcaacatctagtacttgactatagcaaactgaagcccgtaccccacacgaaacacaaacttcgatcactgatcgggcttcgctgaccaggccttgaccaatcttgacacgaacttaacaaagctgcagtgcagaaaaagcaccaaactaacacacgccaaacacttccaaattccaaccatggcctggtctcacacacgccccaattaagcgctgctcttgtgctcgccggtggcggcggccgcggtcttgtcttcctcgccggagcccttgtggtaaccgggcagtttctccatgatcttggccaggatacccttcttctccttcccatccgggctggtcacttcctctgtagccggcggtgggtgtgctggcccccgagtagt

SEQ ID NO: 41471 - DNA, 484 bp, Oryza sativa
  Clone ID: uC-osroM202037g06a1
ttttgtttttttaattattgaggctgggcagaaatcattaataccaaggcagaatgcccagcccaaaaccaatacaagagtgccaataataattaaacaaactcaacatctagtacttgactatagcaaactgaagcccgtaccccacacgaaacacaaacttcgatcactgatcgggcttcgctgaccaggccttgaccaatcttgacacgaacttaacaaagctgcagtgcagaaaaagcaccaaactaacacacgccaaacacttccaaattccaaccatggcctggtctcacacacgccccaattaagcgctgctcttgtgctcgccggtggcggctgcggcggtcttgtcttcctcgccggagcccttgtggtaaccgggcagtttctccatgatcttggccaggatacccttcttctccttgccatccgggctggtcacttcctctgtagccggcggtgggtgtgctggccccggagt

SEQ ID NO: 41472 - DNA, 400 bp, Oryza sativa
  Clone ID: uC-osroM202037g07a1
tttgttttttttttttttttgttttttttttgggcaattgattttattttcaccatgcatacgtcaaataatcacagccataataacaaaagccatactctttgtattaaagatccaacaggttcagagaacacgcaagctcagaactacacatcaccaaaattggggcaagtttgggggtacatatccgctcatacaggggaggatttatttcttgattctacgagctttttaactagagttcgaccgggaagtcaattacggatagaaatgagcattctgtcttcacaaaacccatgcacacaacagtgggcatgaaccgcatgatattcaccatcaagtttagtagggctccacgggtgcgcggaacttggcaccagcgtagacaggagccgcacca

SEQ ID NO: 41473 - DNA, 474 bp, Oryza sativa
  Clone ID: uC-osroM202037g08a1
tttgtttttttttgacaggagtgatgtatatatatgatatttaactcaaatgaagtttctacaagcaaagtaatgacacttttatctgacatttcaacctcaataacttccaggttcaaatatacaaagggctacacaaatgatgagttcttgattcagaatttgtaccgagttctttagacactatatatttatttttttaaaaaataagaagacggcaattggaattggaagccactccccgccacttgctccagcattggcgattggcatctccagaaccaatcacaaacaccctcttgagtttcacccaacacaagaactaccatcccattttcatcttattttgatcccaaatgcacagctgcctaatgccatcatccatccactggttgccaactgactcatgtaacatgtaataacaatagtgataattaacggcaggataactacacttctaggattctcaacata

SEQ ID NO: 41474 - DNA, 499 bp, Oryza sativa
  unsure (1)..(499): unsure at all n locations
  Clone ID: uC-osroM202037g09a1
tgggttttaaagtcacggggcatgatgccccaagcaatcaataatcaacatcttacaaaagtgggcaaaggtctttaatccgcaaaaaagactaataaatcattcccccttctccatggccaaaaacaggatccaatctcgcaaaagtggagaaaacaaaaacaaaaaaagaaagaaagcaaatctcatctcagttatttaggactattgtcttcttcctcctccatagaaatactcatgtggaacgaccatttcgttcaacagcctagngcaaactgtccaccggcttgtcgaaaaggatcttctgggaccggcacctacttgtggagaaaggtttattaccttgggaggagaaggaggtaatggccatgcccaagctgcttgttgcatgcgtagcaagagttcaggaacccattggttcgcaccgcgtcgccgtcgccgttgacgccgccgncggccaccttcttcacgagcacatcgccgcagctctcgacgatgc

SEQ ID NO: 41475 - DNA, 461 bp, Oryza sativa
  Clone ID: uC-osroM202037g09b1
ctcaaaaaccttttttacccgaattttctcaaggactaacattttgccgcctttgtttttttcagacaccaacgggcaccagattactttccccacttgattgattcttccccatactaaccaagagtaaacttaagaaacaagacctggtattgtgcacggttccagcacacgccattacctaattatagtgggtgtttcggtatcatgagatcaatgttttgccgtttactggcagtttgcgaatcgcaatcgttgaccaaggatgccagccatttggcacgttgcttttaacaacttgcctgcggttttttaaaatgaacaaagcataagattattattatcaatgtgtgattaacacataacgacactggtgttatactgaagggaaaaaaagcttgaagaatatgaggctggggagtcagaccattaatgttagattatgtttcattagataccct

SEQ ID NO: 41476 - DNA, 376 bp, Oryza sativa
  Clone ID: uC-osroM202037g10a1
ttgttttgtaacttcaaagggggggatgcaaacccaggacaggggtaatcgcccctaagccgttcgatcgtaaattttctacaacgtcaagtagaagagttacatatgaaacatttcacaggctaagggctatgaggtgctacaactacaagatggcttcatgtagatgctgacaacttctaacaagttaattcagtgcctcagtccagctccatggcattatcttgtgccctgcttctgcaggaccaaatcttgatcgttctatcatgtgacacagacacaatctggtgtccatctccactaatatccaaactagtaacctttgactcatgggccaccaaactcttgactggttttgaatcacgagctgaccaca

SEQ ID NO: 41477 - DNA, 466 bp, Oryza sativa
  unsure (1)..(466): unsure at all n locations
  Clone ID: uC-osroM202037g11a1
tttgtttttttattttttgtgttttttttttttaccacaaagttatttatagtctaatggttccaggccttgcaacctaagctaactgattgccttattttccatctgtcccactaactgagaaatgcaatcttacagaaatgcaatggcaaaaaaaaaaaaggggcgaaaatagatatcatctggctcatgccttctgttctgggggcaaatcaccccatctgacgttgtactttgctgcaagggagtgagcccctacaggaccgcggcttccataagggtatagctcaggggctatccgctttttttccaacttctttagtaagggagtgaagagctcccatgcggcattcaactcatcagaacggataaaaaggcttcggtctccttcaatgggatcaaggaagagcctctcataagcatctggcatctccttggagtaccttgctgcatagngaagattcaa

SEQ ID NO: 41478 - DNA, 496 bp, Oryza sativa
  Clone ID: uC-osroM202037g11b1
gtctcatttcaaacaagtcaagagcgaatagttcttgctgatctgttgtttgattactttagttctcgagaggctttagctgaatccatcgatcgatcatggaggatgagaggaacacggagagccaccagggtggcgaggctgcagagcaggtggaggtgaaggacaggggcctcttcgacaacctccttggcaggaagaaggacgatcagccggaggagaagaagcatgaggaggagcttgtcaccggcatggagaaggtctccgtggaagagccaaagaaggaggagcaccacgcccagggcgagaagaaggagagcctcctctacaagctgcaccgatccagctccagctccagctcgtagagtgatgaggaagaggaggtgatcgatgacaacggccaggtggtcaacaggaagaagaagaaggggctcatggagaagatcaaggagaagctgcccggtcacaaggaccatgcccgtgagcatgcttcttc

SEQ ID NO: 41479 - DNA, 445 bp, Oryza sativa
  Clone ID: uC-osroM202037g12a1
tttgttttagtgtaccatggaattgtagttatagtactattcaatcagccaaattttgttaaaatctgttgcatatgtaatgggtgaattggtctcaagaattataaaaaaaataaatggtgccaacgatcaataattcgccgctttatatacgctataacaggtgagggaaaaaaataaaaagaaagaaaagaaaaaaaatgtgcatctcgttctcgtcgatgtcatcctcccgccgccgcactaatcgttgctgcaccggtcgccgtcctccacccgctgcgctggtcatcgccgcagccctcctccgcaccggtcgttgtcgtcctccacccgctatgctggctgccaccgtcctccactcgctgcgctggtcattgccgaaacccttctcctccgcaccggtcgtggtcgtcctccacccgctgcgccggtcactggtcgt

SEQ ID NO: 41480 - DNA, 500 bp, Oryza sativa
  Clone ID: uC-osroM202037h01a1
tgcacacccaccttaacaccgtcgaccccggatgacgccaggtaggggtgaagctggtcgcagacgtctagcacctcgcgcggttggacgaggcccaggccgagcacggagagggagtccatgacgatgcccggctggttcgccgttacccccggagactgcaccgggtacgccagcgccggctcgtaccggtccatcgccggcgccggcgccacgccgacccagtacccggccatggcgtgccacacgtacacctgccggacgccgtgctccccctttacctcctacaccagcatcctcagcaccggcgtgtcctcgccggcgccgacgttcttgctctggaacttgacgttctccttgatgcccgtgagcccgctggcgaactgggcgccctcctggacggcgaccgcggggtgttcgttcgtgttgtcatcctcgagcccatctgctgccagccgtcttccaaaataaggacccccccccccccccccccccccccc

SEQ ID NO: 41481 - DNA, 329 bp, Oryza sativa
  Clone ID: uC-osroM202037h02a1
ttgttctttgagggagtggggtgcacattcacaaacaggccaacgaaaaggctcgacgccagttacgggttaaacttttcgactaataccgaccagcttatgcagggtaaggcacgaggggcacctctcgggtatctgaccagggaggaccatgcacgaggcacagcttgttatcgaatacccaactaatgactgcaacgtgcacgcctgtatgcgaatagtaccgatacatcggggcaggctggactacagtacactaaggccaggggatggcacgccgcgcctacaacagactggatacacgctctcatttcagattgtacaccagc

SEQ ID NO: 41482 - DNA, 360 bp, Oryza sativa
  Clone ID: uC-osroM202037h03a1
cgcgccctttttttttttttgttttttactttagggggggttatgcaaacccaggacaggggttatacgccataaggcgatcccacgttatttttctacaacgccaagtcgaagagctacctctgacacattccacaggctaaaggctatgaggggctacaactacgggacacctttatctaaatgctgacaactcctaacaagctaatacactgtcttattcctgataaatggggtggccatgtgcccaggctatggaggacccacccttgaacgggatatcccgtctcatagccacgggctgctgatcatcaaccctaaaagtccaactagttacctgggactgatgggccaccaaac

SEQ ID NO: 41483 - DNA, 465 bp, Oryza sativa
  Clone ID: uC-osroM202037h04a1
tttttgtttttttattttttgggttttttttttttttaggtggatagcccccgtcatatcacattttatttcaaccaagcaggatacacattgtttttttattcccaacgtaactaaaccaattttaatgaaaataaaagaaagaaagaaatgtcccttatcccttttacatcctgcattatactggtaactggatgaatctatctccttttatatacaggtcgaaggactgattttcagtcccaggagctactaaccaggtgctaactcctttagggaagaacgcctaatgcccagttagggactattacagaggtattccaagaaacaaccaccaagaaaaaaaaagggagcttggcgtacttcatggcaaaatggttaaaagcatgtatcatttgatttgctttccgcgcatatagcttgatattagtgcagctgtgcaggacttggaggcgccaacttgtg

SEQ ID NO: 41484 - DNA, 506 bp, Oryza sativa
  Clone ID: uC-osroM202037h04b1
tgatttgcttcagctgatcaagagctcttaattagctggctagtgattagctgcgcttgtgatcgatcgatctcgggtacgtagcaatggcgtccaacgcgttcgctctgttcctggccgtgaacctcgatgtgctcggggtggatagactctaaccgaagcagacccgtcgtgcccgacgccgacgccgttgaccccgacaccgtcaacgccgacgccgacgccggcggcgttcgggaggtgcccccgcgacgcgctgaaactgggcgtgtgcgccaacgtgctgggcctgatcaaggccaaagtgggcttgtctacggcagagccaagctgcccgctgctggaggggctcgtcgacctcgaggcggatgtgtgcctctgcacggacatcaggggctacatcctgggaatcaagcttaacctgcacatcgacctcagactcattcttaactactgcggaaagaccgttcccaccggttttaagtgtttagcctaaagcatatgca

SEQ ID NO: 41485 - DNA, 473 bp, Oryza sativa
  Clone ID: uC-osroM202037h05a1
ttttgttttttttattatttgtggtgggcagaaatcattaataccaaggcagaatgcccagcccaaaaccaatacaagagtgccaataataattaaacaaactcaacatctagtacttgactatagcaaactgaagcccgtaccccacacgaaacacaaactttgatcactgatcgggcttcgctgaccaggccttgaccaatcttgacacgaacttaacaaagctgcagtgcagaaaaagcaccaaactaacacacgccaaacactttcaaattccaaccatggcctggtctcacacacgccccaattaagcgctgctcttgtgctcgccggtggcggcggcggcggtcttgtcttcctcgccggagcccttgtggtaaccgggcagtttctccatgatcttgcccagtatacccttcttctgcttcccatccgggctgctcacttactctgtagccggcggtgggtgtgct

SEQ ID NO: 41486 - DNA, 446 bp, Oryza sativa
  Clone ID: uC-osroM202037h06a1
tttggtttttttttttttttgggttttttttttttttttttttttttttttttggaaacaagggtgctacaatatattattggagaaacggcaccaaggccgtttttattattcatagggaacatcccaataacaaggggggacagagcaccaaccacacaccacattccactgaactcacccccaactaaatcaaactggaaaactcccaaattcaaacgaccttacttttttaaggaaaaagagcagtgcctaggaatgcaaagcatcctgaaaaatctctcttgttttttcatctctgaaacccgagaatggaaacaaagcaaagaaactccaatgctttcctttttcagaggctcaacctgagatgttggccagctcacttgtttgacggctcgccctctacggccaacgggacggtgctagccatggggcggtacttgggg

SEQ ID NO: 41487 - DNA, 464 bp, Oryza sativa
  Clone ID: uC-osroM202037h07a1
gtggccggcgcggagcgtctcgatgatgtgctgcacgtccaccttcacgccgtcgacgccgcacgacgccaggtaggcgtggagctcgtcgtagaagtcgagcaccttgcgcgggtggacgaggcccaggccgagcacggagagggagtccatgacgatgtccggctggttcgccgtcacccccggcgactgcaccgggtacgccagcgccgcctcgtaccgctccatcgccggcgccggcgccacgccgccccagtacccggccatggcgtgccacacgtacacctgccggacgccgtgctcccccttcacctcctccaccagcatcctcagccccggcgtgtcctcgccggcgccgccgttcttgctctggaacttgacgttctccttgatgccggtgagccggctggcgaactgggcgccctcctggaccgcgacggcggggtgttcgtccgtgtcgtcgt

SEQ ID NO: 41488 - DNA, 503 bp, Oryza sativa
  Clone ID: uC-osroM202037h08a1
tttgtttttttattttgggggggttttttttccaaaaagccaaacggaaaagctacatgtttatttaggcttagactttttgacttataagttggcttataagcctaaacaaagagggccttaggatttagacgaaaagcccaaaccgaggcacacttcttacgaataccaaaataatgacaattacctccaagcctcttgcaaatattacaaattatatggggatgtttctattccattaatctaagcccataggattcaaattagagcctactaaatattggatacacattttcattcttcaatgtacatatagtctcatgagattgtctgtaaacggtcatgtaaacccacatttcaagggatgaactacagaggtcaacaagactccagcttgggcaaggcatcgaaaaattatcttgcttgacctcacataaaaagcacacgtttgctttttgacgattgcctctgcatgaggggctgcatagggaagaagcagggca

SEQ ID NO: 41489 - DNA, 320 bp, Oryza sativa
  Clone ID: uC-osroM202037h08b1
gcgtattatttaaaggcgagagtgagagagatggtggagagcccggcgatcgactctgcggctggccggaggacgctgacgcacagaggagactgataggctgcgcgactcgtgcgcgcgggtgtgctgcatttcagtgtatgatgcacggcgtgccgttcgagctacaggccgagatgaaggccatggtgcgcgcgctcttagacctgcccgacgacaccaagagcacgaacgccgacatcatcacgggcagcgactacaggctcgccgggacaggcaaccacggttacgagggctttggcctatgacgacgaccgcgc

SEQ ID NO: 41490 - DNA, 513 bp, Oryza sativa
  Clone ID: uC-osroM202037h09a1
tttgtttgtaacttcaaaacgagggatgcaaacccaggacaggggtaatcgcccctaagccgttcgatcgtaaattttctacaacgtcaagtagaagagttacatatgaaacatttcacaggctaagggctatgaggtgctacaactacaagatggcttcatgtagatgctgacaacttctaacaagttaattcagtgcctcagtccagctccatggcattatcttgtgccctgcttctgcaggaccaaatcttgatcgttctatcatgtgacacagtcacaatctgctgtccatctccactaatatccaaactagtaacctttgactcatgggccaccaaactcttgattggtttgtaatcacgagctgaccacagtgctgctttggtgtcataggacgaagttgccaaataatagccttccctgggttcaaacttgacatgtgagataagactcttatgtgctggtatagaatataacattcttttagtgctcaaataccatattcgacag

SEQ ID NO: 41491 - DNA, 452 bp, Oryza sativa
  Clone ID: uC-osroM202037h10a1
tttgttttttggatgtgtgcgcagctagctatagctagcagctgttacatatatatatttatatagtactgatcagagattgagatgcaactgcaagttgcgctatagaacgagttactaacatgtatatattaattcctccgtcgatccctatatgcaagctagtaattacagtaattagcagctgtagcaaggatgtaacaattgagatgagctgagtactcccacatgattaggaggcatcgatcgatcgagttgatgtagtcgtcatcgtcttggcggctgatggatgatatatactatccccagagaggtagcgaataatccgagcagaagaaggcgtcatcgatatcccagagcggcgaggcgggcatcggcggcggagcgacgacgttggtgctgctgctccagcagtcgacgtcgacgatgatgtcgtcgttccagagaggatg

SEQ ID NO: 41492 - DNA, 410 bp, Oryza sativa
  Clone ID: uC-osroM202037h11a1
tttgttttttttttttttgggctacgatcgatatacagagaaactggatatagtaacagactacacagaagcttcacagagatgagaaaaccactaccaatacatgtcagaacttacaggtgatttagctcaaggagggcactcaaaacacttttcaagccttcagctactgaccaccagagacgtcttacaaaacgggactgcagcctgctacgcagcacaggtgacaaaacgaagcacggacgcaaacctcacccatacatccatcacgcacgtcagagaaagaaaaaagagcacagcatcacaaagacacaaaactcttcactggcaaaacaacctgtgaagggcaaatggggctcaatgctattcggcctcagcttcttcctcttcgtcttcgtactcttcatcgg

SEQ ID NO: 41493 - DNA, 491 bp, Oryza sativa
  Clone ID: uC-osroM202037h11b1
gttttagttcaaacaagtcaagagcgaatagttcttgctgatctgttgtttgattactttagttctcgagaggctttagctgaatccatcgatcgatcatggaggatgagaggaacacggagagccaccagggtggcgaggctgcacagcaggtggaggtgaaggacaggggcctcttcgacaacctccttggcaggaagaaggacgatcagccggaggagaagaagcatgaggaggagcttgtcaccggcatggagaaggtctccgtggaagagccaaagaaggaggagcaccacgccgagggcgagaagaaggagagcctcctcttcaagctgcaccgatccagctccagctacagctcgtcgagtgatgaggaagaggaggtgatcgatgacaacggtcaggtggtcaagaggaagaagaagaaggggctcaaggagaagatcaaggagaagctgcccggtcacaaggaccatgctcgagagcatgct

SEQ ID NO: 41494 - DNA, 322 bp, Oryza sativa
  Clone ID: uC-osroM202037h12a1
ttgttcttttgatttttggggtttttacatgcacatcaaattatcggggattaatcaacaacacgacaagacaaaacacgacgcacattacgaggacatgttgacattaatgcatgcatgcatgcgatgacccgacactgtcacacactgacacactcactcgctaaagctagcagtcgctacatattgttagtaaacggactggccccccatccaaatgattaacttaaaactaatagacggcctaatcacccactaattcaaacgaaatttaaccaaaccaaaaccaaaatcacgggctgaagcagataatcttgagctt

SEQ ID NO: 41495 - DNA, 399 bp, Oryza sativa
  Clone ID: uC-osroM202038a01a1
cctgaactactagcatatccattgcattcttttttcaaactacacggttctttcaaatccagggaaaagttcaccaattcttcaagaacatatacacacatctcactcacatatactacaaactagtcactaattgaaatttctacaaacttatccaagaaaaagaaaaaactaccactcgtacggaagcgacgactagagttgttacagttgggaaaagagatgacaccaatggttagcggcaaccactccctgcgtgatcacgcgcgcggtcaaattacttcgggtaggccgcctcctcgtcgtcgccgtcggcgacctcctgcgagataaccttgagcgacatgcccttggactccggcacgagcagcgttatgatcctcccgaggaagtttgtgc

SEQ ID NO: 41496 - DNA, 364 bp, Oryza sativa
  unsure (1)..(364): unsure at all n locations
  Clone ID: uC-osroM202038a02a1
ggggaccgggaagcaattgaccccacaaaaaaacgggcccagaaacccaggtgaaccccgggaacaaaatccccccccatttgacttggccaaaggggggaaatgggctaacccccatttacaaaatgagggggggaaccgggcccaaaattgggaaaagggccaggaaccagggttttctttcccggggccaaaaaaaaccccccccaaagcccccacaaaagggcagggcacccaaaatttttcccggggggccacccgggggggggcttcgggggcgggggccccgggaaccaaaacccaaaccggtaaaaggcccccagggggggccccccgggggggggggaancccctaaaccaaaac

SEQ ID NO: 41497 - DNA, 468 bp, Oryza sativa
  unsure (1)..(468): unsure at all n locations
  Clone ID: uC-osroM202038a02b1
ccgcgaaacgcacggcgtcacgagtccagcaaacagcaagagaagagaagagaagagaagagaacgcgtcccgcttccgactccggcgagagcgagaccgagagcgcgcggcggcggcggcggccggaggaggagaagacgatgggttgctgctgccggtgcctggagatcctctgcgccatcctcctcccaccgctcggcgtctgcctccgccatggctgctgcaccatggagttctggattagcgtgctgctcaccatcctcgggtacctccccggcgtcctctacgccgtctacgtcatcgtctccgtcgaccccgaccgcgaacgccgtcgccgcgtcgaccccgacgaatacatctacgtcgcctgaccatctgtggagtacttagtaggtgattaatttagctcctggaaagcatatccttgntcctagtcctattacctatatctgctcctgttccaccct

SEQ ID NO: 41498 - DNA, 485 bp, Oryza sativa
  Clone ID: uC-osroM202038a03a1
cccgcaaatacttattcatatgttttgacaacatttctcccgacgcatgctcattgtggcagacgcagctgaccacctagagcttttagttcaccattattatttagaccaagcatacgtcccaagatcagaacacatgcttacaagcgaaaatactaatagcctggctggctgcttcacagaataaccaaacgacaacctcaacagataaaaatgccacggaatgaaaacaaagcagcgaatcgtcaccagaagtcccatcttactcatcaaacactccatcattctcctgcaacgcatcctctccccaggggagaagattgcccagtttaccttccttaacaggagcagggttcaccatattctcagcctcgaagcagtgcagaacagatttgggcgacccaacagcaacaggtacgtcttcagtagcgtcgaagctctggtagatgaggaggccaccacagggcagcttctgctttaccatg

SEQ ID NO: 41499 - DNA, 494 bp, Oryza sativa
  Clone ID: uC-osroM202038a03b1
ctttcttgtttaagaactcccccccctcctcgctgcccggctccgtcgccgttttcttggagaggagaaatccgtaggctcagaggatttttggtagtcttgtttcgcgatattcgtgaagagggggggagctaaggggggattcgtaagatcagaattggatcacgcgggggcgcgctcgggatcgggggttccaaacacaggttcttcgttgaatttaagtggatgtactaatggagtcaaagggtggcaaaaagaagtctagcagtagtcgttccttgatgtatgaagctccccttggctacagcattgaggacgttcgacctgccggaggcgtgaagaagttccagtctgctgcttactccaactgcgcgaagaagccatcctgatagccctttcggcttctccatcctagtagtttaggatttcttgcaattccattttggcacttttcttctgacctatttctctggctgctgcttcctgattatcga

SEQ ID NO: 41500 - DNA, 437 bp, Oryza sativa
  unsure (1)..(437): unsure at all n locations
  Clone ID: uC-osroM202038a04a1
acatctattaattaaaccaaaacaactgtacattattattcagattacaaaacggcatttcaccatgcaaatcattttactggaaaagtaacaagcagaacacaccaaaatttccaattgtttatctaccaaaatataagaaggctgttctcttttccctattgagcccggccttatctttcaaagacaacttgctgtgatcaaagactaaaaacgttgatcctaatttagattgcactggtcttgaaaagtttgcctgtttcatttatgctgcaacaggctgcacaaaacctgcacccgagggggttatgtcctctgcggcatcttgttcattccttgacaagtacttgtcgacagctgcagcagcttgccgncccttggtgatggcccaaacaacaagtgattgtccacgtctgcagtccccggcagcaaaaatg

SEQ ID NO: 41501 - DNA, 460 bp, Oryza sativa
  Clone ID: uC-osroM202038a05a1
acgcgtaatatactcgtactgtatatgtctaccatgtaaaatgtaaaatactatgtaattacatctggtcgccacataccgctgcgctagctcattctacaccgccgtcgtccgagctcacggccgccgctgttacctgtctgacttgtctccggccacacaataaaactgagccggtgacctcaacgcgcgcggccgtgccactcaccacgaggctagtcagaactaccatacagctcatatgctaacacaagaacagaaagggaacaaaacaataagcaagagaagcacggacgggagcctactactactccagccgcagcatgcggcggaggtcgcgcgttgcggcgtcatctacggcggctgtgacggcggccttcctgaacgggaactgccgcagcgggacaaagctcggctcgggggacacggagaacgccgggcccgggtacaccttcaccgt

SEQ ID NO: 41502 - DNA, 437 bp, Oryza sativa
  unsure (1)..(437): unsure at all n locations
  Clone ID: uC-osroM202038a07a1
gaaatgaatgtgcattacagcatacaattttttgttcaatacaacaattctgaaacaggattacaaagacttcacgggggtacatttgattcacaaggcaataaaatccccaacattagagtctagttcatcgaccaattactaaagaactaattcaattattcccaaagaaccagatgataggctggtgcattggggaaccattttattcaagcttcggccaaaaataaatagcaaacttcaacagaacgcgctggtaaagcactgaggggcaagcatttaacagcagnctgaagcactgaggaatcgaaaccccaaagggaacaaatcctggctgcccaggtagtaattaccaacaacagatccaggaaacttcaagcttcataccaaaggcttttaagcaaactttaaccccccgggatgaaccgatgcctttt

SEQ ID NO: 41503 - DNA, 397 bp, Oryza sativa
  Clone ID: uC-osroM202038a08a1
accagtctaaaagcagccttcttttactcttgccacataaacatattcagtttaactacacttttagcaccctgtgtggatgtcatgtgatgagaggcaggaccgactgacttgttcactcacgggattattcaagctgccaggctctttgaagctatctcgtacacattctctgatagcccattggctgacacgatcatctccagctgagccttagcaagagcttgtctgctctcatcatatcgcctccaccgagagaaagctgacaccatgcgggaggccacctgaggatttatcttgtctagctgtaaaacaacttcacccaagaacttgtaaccagagccatcttttgcatggaaatttacaggggaacccacaaaattctccaattagcgaa

SEQ ID NO: 41504 - DNA, 465 bp, Oryza sativa
  Clone ID: uC-osroM202038a08b1
cggagtttcagcctccggttaactgctccgatcgatcgctcgctggctgggggggactcgacgagtatcatcgcctgccattgtcatcatcgcataggagttcccaactgaagaattgctaccttcctaatttaaggaaggagtttgtattgttgtaggtctcgcattggacaagaccagccacgccttccttgtcgctatatagcgcaaggcttgccagcaagaggacaacttgttccgttgcaaccgagccgccggcttccacaaccgaagaaccagagatggatcttccaaaggagatattcctgaaagaatacaaaaagcctgattacttatttgactcggtcaatttggaatttcaacttggcgaagacaaaacaatagttacatctaaaatagctgtatctccaggaactgaaggtaccttcttttcacttactcttcatgggcgtgatctgaagctgc

SEQ ID NO: 41505 - DNA, 466 bp, Oryza sativa
  unsure (1)..(466): unsure at all n locations
  Clone ID: uC-osroM202038a09a1
ggaaggattgaaaatggttcaagcgttagctgctcccagagggagcttgggatatgtcagatgtttccaataggtggttctctctatacacatgatgtgatccacgaaagagggaatgctttagatagtaaattacacatctgattcgttatgcagaagtgcaatggggtaacagatagaactgctgatgggaacgaatttgtgtatccacaattcagcagatggctgtccaaaattctgtagtccatattaatgcaagcttcaatgtagatcaatcatagcttggacaatatgtggctgcaggtggtcccatgtgaatantctccattgatcgcatgctgaacatttgtcaatcttagtactgttttctagagtacagaatttacaggaccaggttgcatatttggccttcgtggttttaggtttagctgcgctacaaactttacagattggtgccagagctgat

SEQ ID NO: 41506 - DNA, 488 bp, Oryza sativa
  Clone ID: uC-osroM202038a09b1
cattaactcgccccccaaaattcctcctgcttggggtcgaaggcggcgaaccccatggattcctcttcctcctccgccgcacgcgccccaatccgattcaaccgccggcggcggcggcggcggcggcggtggcggcgatggaggtcggggacctgcacaaggtgtgggagatccgcgcgctcaagagaaagcccgacgagcccgccgcccgcgcgctcctcgaccgcgtcgccaagcaggtccagcccatcatgcgccgccgcaagtggcgcgtcaaggtcctctccgagttctcgccgaagaacccgaggctgctggggctcaacgtcggcgggggagtcgaggtgaagctgcggctgcggcacgcgggacgggactacgacttcatcccctacgaggaggtgctcgacaccatgctccacgagctctgccacatcgcgcggggcccccacgacgcgcaagtctacaagctctgggatgagctcccc

SEQ ID NO: 41507 - DNA, 414 bp, Oryza sativa
  Clone ID: uC-osroM202038a10a1
tttttgttttttttttttttttttgtttttttttttttttttttttttttttttttttttttttttttttcggggccccccccaatttattttaaaaaaaccgcaggggatatttccacaatggcgggcaccacttcccaaaaaaaaatcgacccctggggcgggcaaaaggcatcaccgtggggaggcagagcccactgttatgcgaaacaggggcccaagaaccccaaggccaagaccctgaacactgtttataaccggaatgaatttaacaggtttggccagcccaaacatgattgtttttgaagtccggagaaggggggccccccatgggaaacatcaccgaagatgaacaaatccattttggggtagggcctccacaaattcatgctttggggggggccaagccccttt

SEQ ID NO: 41508 - DNA, 403 bp, Oryza sativa
  Clone ID: uC-osroM202038a11a1
ttttgtttttttttttttttttttttttttttttttttttttttttttttttttaaagggcaagggttgttccactcatttttgggggacattggcattacctaggggggatgagaattggtttcattcattttacattaatggtggctcataattacaattccgttaaggggaaaatcgttttgggggatttttcctcagcttacaattaacacatacatccattaacaagcatttgatatggaatgatgcaagatgttcataaggttcattcattcaggtattacggccttgtgttgggtccacggggacccatctatctttgggctccccattttcttttgaaaattgcccttaaaataggttgaatccctcaaaggaaggctcctggaactgtgactgg

SEQ ID NO: 41509 - DNA, 347 bp, Oryza sativa
  Clone ID: uC-osroM202038a12a1
aaaagggcaaggattgttccactcatttttgggggacattgtcattacatagaggggatgagaattgctctcattcattttacattaataggagctcataattccaattccgttaagaggaaaatcgctttcggagatttctcctcagcttacaattaacacatacatccattaacaagcatttgatatggaatgatgcaagatgttcatcagcttcattcattcaggtatcacggccttgtgttgcgtccacggggacctatctattttttgcctccccatttccttttgaagttgcgctcatcatcggttgaatcctcgaaaggaaggctcctggaactgggact

SEQ ID NO: 41510 - DNA, 192 bp, Oryza sativa
  Clone ID: uC-osroM202038b01a1
tttttgttttttacctgaactactagcatatccattgcattcttatttaaaactacacggttcttaaaaatccagggaaaagtttaccaattttccaagaccatatacacacatccaactaacatatactacaaactagttcactaaatgaaatttttacaaacttatccaaacaaaaaggaaaaaactacc

SEQ ID NO: 41511 - DNA, 418 bp, Oryza sativa
  Clone ID: uC-osroM202038b01b1
ctttgtgttgtagagaacagtcaggtcaccgggggagcggtagaatatgctagaccagtggagagctcagagctcaaagagttgggaagccatgccgggtgggcagctcaacgtgctgagcacgctcgaccaggcgatgacgcagtgggaccacttcatggagaacgtcatcgtcggcatgggcttcttcaccgacgcctacgagctcttctgcatttacctcgtcaccaagctgctcggtcgtatctactacaccgacgattccaagggcacccgcggagcgctcccgcccaacgtgtaggacggcggcaccggcgcagcgctctgcggcacgctcgacgagcagcttttcttcggatggctcggcgacaagctcggacacaagagcgtgtatggctttacgctgattctgatggtc

SEQ ID NO: 41512 - DNA, 310 bp, Oryza sativa
  Clone ID: uC-osroM202038b02a1
gatcaagctatagctagatatatataaagcagagttgtctgacaagcaatgcataatacgtgcatcatcaggtgtaattacagtagacagatgcaaggatatgcagtgcaaatatagatttcgcagttcgttcatcagatgatgagagtcgtcgtcgatcgatcgtcagctaattaagctaagagcagcaattgaattaaggcgttgcttgtttgcaatttgagtagtactattgcgaggccatcgagcatcttcttgtagtacttcctcgtcgtcgatcctccacagcgagtagccggtgcagaattcc

SEQ ID NO: 41513 - DNA, 389 bp, Oryza sativa
  Clone ID: uC-osroM202038b03a1
aaatccctcaactcaaaagctatctaatgggattagccatgtaaacccaaacatactcactgcaactggtcactacacactcaatcttcactctaatgtactacaaatgcataacgctcatggtaaaaagatatgcaggccaaaaaactcacaagaccgaaaatctatgatatgctacagtacacaccacaatgaacactgtcacagcacaaacaaaagccccaaaaaagaacttcaaaaaaaatcacacatggcgaggcaggtggccattggaggcgctgttgaaggtcttgctctcggcattgcgcctcttcaccaccatgccccatgtgacgacctcaaggatgatggcggcgacgccgaggaggcagaggacggcgacgtaggcc

SEQ ID NO: 41514 - DNA, 312 bp, Oryza sativa
  Clone ID: uC-osroM202038b04a1
gttgaagcgcggcaataaaacattgcattgaattctgaacgataaacaccaggaaccggcgtttatttgaggcaagcactgcccaaaatgtaggaaaagggctgaaaccttagacatagtacacatccatggcaaacaaggaaagccaaatgacaacgtgcagaaaattatcaaaatcgaaagcagctgacggcttctgcccgctgaagaggcatagtttccccctccattaacttggatgggcctctctccatcgacaggccaaagggcacgggcgctggccaggcctgcggtatttcagagcatagaaca

SEQ ID NO: 41515 - DNA, 276 bp, Oryza sativa
  Clone ID: uC-osroM202038b07a1
tcgacggccacgcacgggctcgtgtctcgctgtcccgtccgccgcctcttctccactcccccacgcttccgctccagatctgcctctccgcccgcccggatctagccaccggttcgccggcgcccgccgctcgggagctgaaccgcgtggccgagtggcgaccctctcctaccgcggtagccatgaatcaattttcgtgcctcctgaatcagcccgcccagggccaagggcgaggccttaccaaggcggtcacctccgccttaacacccccagaag

SEQ ID NO: 41516 - DNA, 440 bp, Oryza sativa
  Clone ID: uC-osroM202038b08a1
gaaaaaaaccaccagtttgatactattcgaaatcactgcaatgagtgagtgacacaatggagcaacaccaagagtgcactgcaaagccggttttgatccttacaccacacaaggcgagagggagacacacccgttgataatgttgttacaacatcgacatgtccatcgatatctgaggtgctacatggcgtacctctgagtccaggtccttgctgtgttctcgtacttgtgcctatctgtcttgtacatgtgggcgatctcagggaccagaggatcatcagggttcggatcagtcagcagggaacagattgacagcaacaccttggaaatggttagtgctgggctccattggttccttaaggatgtcaaggcaaatgctcccgttgctgttgatgtttggatggaaaaccttggtgcgaaacgccaccttgggtggtttg

SEQ ID NO: 41517 - DNA, 117 bp, Oryza sativa
  Clone ID: uC-osroM202038b09a1
ctgggccccccccaattttttttaaaaaacccctaagggattattccccaatgggtgtcaccatttcccaaataaaattcgcccccttgggcgggcaaatgtcatcacgtaggggtc

SEQ ID NO: 41518 - DNA, 442 bp, Oryza sativa
  Clone ID: uC-osroM202038b10a1
gagcgagaaccgaatccaatatggctgccttgccattagccacagccgaattatgtgatgcaaatgcacatttgatcatgaatggcgagcttcgtgctctccagcccgtcttccaagtctacggaaggcggcaggttttcgccggccctatcgtgacgctgaaggtctacgaggacaatgttcttgttcgcgagttcctggaggagaagggccaaggcagggcttctcgtggtcgatggtggtgggagcctgcggtgcgccattttgggtggcaaccctgtgcagcaggcgcagaacaatgggtgggctggcatcgtcgtcaatggttgcatcaggggacgtggatgagatcaatggctgcgacattggtgtccgagctctgaactcgcaccctatgaaagcaaacaagaagggcatcgggagaagcatgtgcctgtgacca

SEQ ID NO: 41519 - DNA, 352 bp, Oryza sativa
  Clone ID: uC-osroM202038b10b1
ggagagagcatcaattattccaagtgatcatttaatttaacagtacgttattacagtttttgacaatacaccaggaggggcagaagcagcactccatttatgcgccgaattttggtacagacacacacacacagagagattcacacagtcaattcagtccttgagatgagaataccatcagtatcggcgtagagccactccccgtcgcaaatcctggtccctgcaatggtcacaggcacatgcttctccccgatgcccttcttgtttgctttcatagggtgcgagttcagagctcggacaccaatgtcgcagccattgatctcatacacgtccctgatgcaaccattgacga

SEQ ID NO: 41520 - DNA, 515 bp, Oryza sativa
  unsure (1)..(515): unsure at all n locations
  Clone ID: uC-osroM202038b11a1
aggtgactaaaagcagaatttattataaggttctcaagagcgaaggccagagcacaagaatgctcatagcagtacaagacttaggttggatcatatgcagcataacaacacaatcctgattgcttgaacattcaacatccaggacacacataataacacaaatccttaaacgagcaaccaactgggcacacctcagcttattctgtggaccatggacgacaaacctgtgcctagaacaactaccttaagcaggaggcttcatcagtgaagccaccttctgggaagacggccttgccatcaggtcagtccaccaggccttcacatgcgggtatgcgtccaacacggatgcgtggggagtagcccccaagcatacagtgccagccacatggcttaggtccgcgacactgatgtagtctccagccaggtacttgcacttcgtcaggcgcgccttgtacacctncaacaccttcttcagcttcttaaggttctcctcaacaactttctcgtcgggggtg

SEQ ID NO: 41521 - DNA, 541 bp, Oryza sativa
  Clone ID: uC-osroM202038b12a1
gggtgcaggtccgcagcaaactgaacgagtcgctcaatcagcaaatcgtccgacacaacgcacagactgacgcgatcgtgcgcctgagatcgaaccgccgcttcaaatgcatcgtctgtatcgtattcgctgtggtcgtcgcgcacactcaacacaccggatttgggcggctcccgctctgttggcaaagactccgcatcctccgcacccgacatcagcgacaggatcagcgccagttttgtctttttgaaagcggttggtggcacgatatgtgaagcgaaagactcgacaatgagtgtagtgattgcccagtcgctgacccaacagccacgataatagttggacgcgtcgatgtccgccgctcgtgccgcactgagaccggcagctccgagccaattgtgatgcgccggtagacttgtcgatcccgtctcattgacgatacgccccgccatctcaatgatgcccctttcgcgctgttgcacaccgatttggtagtagtagcgctctggcgacgttttccaacaattggtcacgtggtaaa

SEQ ID NO: 41522 - DNA, 295 bp, Oryza sativa
  Clone ID: uC-osroM202038c01a1
tttttgtatagctcaaaatccaattttcatagcctcttgcacctgattattttggttggctggaagccacggttgacaggtgacacatcaccaaggcgccatgagttattcacaccaaattgcacgaacaaataaacctgattctaacaacgtggatgcttgcgagtgccttttttcacaaatttgaatttaccacgaggaaaataaagataaagttacattttttaagccaacaaacccttttgttaggggcattcaaaccaacttgcctgttcgagttgggccaattgcccgg

SEQ ID NO: 41523 - DNA, 465 bp, Oryza sativa
  Clone ID: uC-osroM202038c01b1
gtttacaatcaaggattgctatttgatgcgcatgctagaacagctttggcatttgtgacactccgaaatgatggtgaacgtgaatttatgttttatcgcaatccaagtgcagatatgctgcttgaagaaaaggaacttgaccttgatcttatcagaaaggcaaaaatcttccaccatggctcgataagtcttataactgaaccatgtaaaactgcacatattgcagctgccaaagctgctaaagatgctggggtgctaaattcgtatgatccgaatttgaggctcccactgtggtcatcagctgatgatgctagagatggtatactgagcatatgggaaactgctgatgttatcaagattagtgaagaggaggtttcctttttgacgaaaggggaggatccatatgatgattctgtaataaaaaaactcatgcacccaaatctgaaactgcttcttgtcactgaa

SEQ ID NO: 41524 - DNA, 113 bp, Oryza sativa
  Clone ID: uC-osroM202038c02a1
ttttttttttttttttttttttttttttttttttttttttttttttttttttttttttttttttttttttttttttttttttttattttttttttttttttttttttttgggg

SEQ ID NO: 41525 - DNA, 451 bp, Oryza sativa
  Clone ID: uC-osroM202038c03a1
gaaactgaaatatactgtctttattccgacaaattgatatttgatacaagcaatcaactaaccacaaatataacccaacctttcagctgtatatatagaaatgttatttttttccactgtaattaatctttctgtgctgttcatcatcagatcatagccaaggggtgttgtagagaggggtgaccaccgccttggtgtggaggtacttctcaagggcgttccatgcccatgtccttgccgaagccgctcatcttgtaccccccgaacggcacgtcggggtcgaagccgaggtagcaattgatccagattgcccctgcccggatcgaccgcgaaaccgtgttcgcgacgtcgatgttcttggtgactttgcccgcagccaggccgtaccgggtgcttttcgccttttggatcgccttcttaaccgtcttgaatttcatgagggccatcaccg

SEQ ID NO: 41526 - DNA, 260 bp, Oryza sativa
  Clone ID: uC-osroM202038c04a1
acatcaaagaacaaccacttttataactaggtcatataaccaaaacaaatgtgacctactgaaaatgttatgaaacttgagatggaaagaagtcgaataagatgccctaaggcaaaacatccgaagatcatattggacatgggtccacagggcgaaccaatgcttcaaaatggggggcttgaccctacgctgacgtgccctcttgtgagcgatgtactatactgacccagcacgtaaacgatggaccagcttggggaggc

SEQ ID NO: 41527 - DNA, 504 bp, Oryza sativa
  Clone ID: uC-osroM202038c05a1
gaagagctgaaaaccaaaatttagttgctactattatttatttctatattttacacaccaatctaaaatactattgttcctcacaaaattaaagcttgcaaagtcacaaggatacaagatccacacacacaatcccacaaactttacacaggcactttgcaggcttgcagcacaacgcccagttgcagctcaaaagcaagcaaggcaaacggacgtctggcccacatgtcagcctcacagtgaaggtgaaacaccatatggcatagtgcagagttcagacttcagacaagctcaaacattcagagttcagttcagcaagatcgtcagtcgagcagaagagaggcctgcctgaccaggtggcctctgcgctcgaacacctgcctcctgcgcctctcgaggtccctctccacggcggcgatctcctccatctcgcggtcgcattcggcgatcatcgccgcatactgcagctgcagcgccatggacaggggcaccatgtttctgctg

SEQ ID NO: 41528 - DNA, 71 bp, Oryza sativa
  Clone ID: uC-osroM202038c06a1
cttcttaaccctgttttttttattcattgtttggttttctacacttgccactttagctggcttttttttcc

SEQ ID NO: 41529 - DNA, 226 bp, Oryza sativa
  Clone ID: uC-osroM202038c06b1
gttcatctccatgcgtgcatggatgtatgttgcgttcagtttctgcatgtttgttacacctagtttgatcggtttggtgaatgtttcctagttgggttcaaacttccctgttaaatttcctgcgtgaataaaatagagcatactcagtatgcatgagcatattggcatccaatataataaatttttttttgaggcttgaagaacactaccattttgttgcccttaa

SEQ ID NO: 41530 - DNA, 390 bp, Oryza sativa
  Clone ID: uC-osroM202038c07a1
ggcgctggaggcggagtccggcatgccgctgtacccggcggagcacgaccgcctcctgttcgacgtaatgtctggccggtgggacgcgtgcgtggcggcgatccgcgccgtggcgggcctcggggaccgggagcgcgcggcggcggagttcttggtgtggagggggcacttcctggagcttctggggatcggcgacgctgggctgccgcgcgccagggaggtgctctggcgccggattgcgcccctcggcgttgacagggagtgtgtgcactggctggcacgcgcaatggtctcgtgcgagggggcggtcgcgccggatgccggggtcgggtggaggaattgggcttttcttggatctggttgatgctttcccgccatggttccatgtgc

SEQ ID NO: 41531 - DNA, 465 bp, Oryza sativa
  Clone ID: uC-osroM202038c07b1
ttggttttatacaaggttctgaattctgatgcatctttgattctttacagagtagacgagcaaaactttaatccgagacaggcatatatatgaagtatactgctacttctgggcctctgcctgttcaaagtttacctctgaagtagctaaaagctctacggggaaaaaaaatctcaactgctctgtgcacactacactactacagtcaagatgtacaactatatatttacaaggaaaacatacaaaactttccacatcaagccgtcaaccgtgtgcgatgtgagcctttgtgtgctagccaaatccgaactgtgcggtcatcacttgccgaagccagcatatgtggcttagcaggattccagctcacacaatttacagtaagtgaatgaccgtataagacctttattggcgtctccaggtgccttttccaaatgtagacctgggaatcctcactgccactagcta

SEQ ID NO: 41532 - DNA, 502 bp, Oryza sativa
  Clone ID: uC-osroM202038c10a1
cggtatcaatatctcgaaatttcaatattattttggaaaataccatatttatcgattacgaatagaagaaagataacaattgagcacatctggcgctccatttcacacaattattttgcgagaagacagaagattaaaattgaattacaaattattttgctagatccccagcaagcatgatccatccagattattggtgcatagggccagcctgcgacatgttaagcaccatcccacaaatcttcgacgcacttgtaaggcccattgtcacagacgaactgcattccagtcagacccctctgctgggggagtttgctgattttgtctctctcttcctcagtgagctcccagtcgaaaatatcaagattctccttcatcctattttcattgtatgtcttcactaacaaaacatcaccctgctcgtacatccacctcaaacaaatctgagcaagcgtcttgcccttggtttgggcgatgtcgtgcaggacgccggagtccatca

SEQ ID NO: 41533 - DNA, 208 bp, Oryza sativa
  Clone ID: uC-osroM202038c11a1
ggggggccaaaatgccaaagcaaaccgggaatgccctattttattcaccccggaaatttaaaagggaagtttgaacccaacttgaaaaaatttaccaaaccgaaaaaaatagggggaaaaaaaatggaaaaactgaacacaaaatacattcattcccgggtgggaaaggaccaaggcatgggtaaaaaaatggtgcacttttaacaag

SEQ ID NO: 41534 - DNA, 863 bp, Oryza sativa
  Clone ID: uC-osroM202038c12a1
aaaaaaaaaaaacccctgcgccaaaaaaaaaaaaaagagggggggaaaaaaccccaacacaaaaaaaaaaaaaaacagaaaaaaaaaacaaaaaaacacaaaaaaaaaaaaaacaaaaaaaacaaaaacaaaaaaaaacaaaaaaagaaaaaaaaaccaaaaaaaaaaaaaaaaaaaaaaaaaaaaaacaaaaaaaaaaacccaaaaaaaacaaaaaaacaaacaacaaaacccaaaaggaaaaaaacaaaaaaaacaaaaaaaacaaaacagaaaacaaaacaaacaaaaaaaaaaaaaacacaaaaaaaaaaaaaaaaaaaaacaaaaaaaagaaaacgggaaaaacaaaacaaaacaaaaaaaaaaaacaacaccacacaaaaaaaaacaacaacaaacaaaaaacaaaccaaaaacaaaaaaaaaaatacaaacaaacaacaaaaaaaaaaaaaaaaaaaaaaaaaaacccacacaaaccaacaacaaaaaaaacaaaaaaagaaaaaaaaacaaaaaaaaaacaaaaacaacacccacaaacaaaaaaaaaaaacaacaacacaacccaaaaaacaaaaaaaacaaacaacaaaaaaaaaaaagacaacaacaaaccaaaacaacaaaaaaaacaacaaaaaaaaaccacaacaaaaaacaaccaaaaaaacaaaacaaaaaaaaaaaaaaaccacaaacaaaaaaaacacaaaacaaccaacacaacaaacaaaacaaaaaacaaaaaacccaaaaaaaaaaaaaagaacaaaaaaacacaacaaacaaaaaaaaaccacaaacaaccaaaaaaaaaacaacacccaaacaaacaacaaaaaacaaaaagccaacat

SEQ ID NO: 41535 - DNA, 207 bp, Oryza sativa
  Clone ID: uC-osroM202038c12b1
catgtgcagagtgctgctatcttttagccatgcactggtccatctccatccgtgcatggatgtatgttgtgttcagtttctgcatgtttgttacacctagtttgatcggtttggtgaatgttttctagttgggttcaaacttccctgttaaatttcctgcgtgaataaaatagagcatactcagtatgcatgagcatattggcctcc

SEQ ID NO: 41536 - DNA, 54 bp, Oryza sativa
  Clone ID: uC-osroM202038d01a1
atgaaaaaaaaaaacccttaataaaacaaaaaaggcagggttaacccaaaaccc

SEQ ID NO: 41537 - DNA, 391 bp, Oryza sativa
  Clone ID: uC-osroM202038d02a1
gagaagtcagaaccatatgcgtcagcaaacaaattcttcaaattacatagtagtacacaactgaaacaagctgcccatttcgcagctgctatatatttacaccaatcattctgtatgaaacacacaaatcaccgtcataatacaggctaagctattgttaccatgaccggatatacacttggatgtagaggttgcaatgattttcactatcggaaaaaaaaaaaagggctactgttacctttgcccagctctttttgctaacctccgcaattgaaaatcacagcacagtggtgcagcttaacttcttgccaaccaaactgtactaatgtactaccaaaaatgtgtcctccccagctcaactacctagcttatgagttatgaaagctttgct

SEQ ID NO: 41538 - DNA, 430 bp, Oryza sativa
  Clone ID: uC-osroM202038d03a1
aagtaaaattactgcataattaattacttagctaaagtgatttcgacaaatatcacaagattgttaccacaataaaaactccaccaatctactcagaaatacattgccctaaaaacaaactgtctcgtcgtcgtcgtcatcatcgtcgcgcaccaccacctgggtacgaaatgaccagtgtacccccgccgcgatatcaaatttacaagctagtacccctgacccctcctcgcaactaacaacaaagagaagagaaaaaaaaacagctaagaaaacaaccatgaagccctagattgctcgctcgcccggagagagagctttactttcttcgccttccgggcgggcaccttcctcgccggaacggccgcctttttcgccggcgcggccttcttggcgggcgccttctttcgccgcggcggcgggcttcttg

SEQ ID NO: 41539 - DNA, 368 bp, Oryza sativa
  Clone ID: uC-osroM202038d05a1
gggtaaacgaagaactttattgctctcaacagagaaatttgttgctaaaaaggtgtacaattgagctatgggcctgatttagtgtgtacaaatacatgactgaagtggaaacatcagtgtccttttgtgaggcagtatagacaggtggaacatccttaaatacattcctgagactctgagagtgaaagctgtaaaaagctacccaaaaaattctctgtaactgttaactgagcagtgaatactcctacagcaatggtacagtgaaccgaaaaaaagagggtgccgccttgtcaaaaactgtagtcgatatcagagatattctgcagtgcctgattgtttaaccagcttaagccgctcgttgtacagat

SEQ ID NO: 41540 - DNA, 410 bp, Oryza sativa
  Clone ID: uC-osroM202038d06a1
cattccgatagatagcaacaagcagttcaaacaccataaccaaagcgaactcaattcatggtaacatcacggacgaagaacacctaacactggatggatggatagagggcttctcgactcgagagagccactggacacgataacgactcgactcgatgataagatgattctgacacggatagctaaggataactggccacgatgggccccaccaatcagttcctccagttcccgccggagtcgccgccgtagccgccgccacggctgccaccgtagccgccgccgccgccgccacggccgccgccgtagccgccgccgccaccgtagccgccctcacggcgcccgtagccgccgccgccacctccttcgtagccgccgccttcacgaccgccgccgtagccgccaccgtc

SEQ ID NO: 41541 - DNA, 413 bp, Oryza sativa
  Clone ID: uC-osroM202038d07a1
ggcatgtcaattcacatccagtcagcaggagataactgagctagaggttgcaagatcctttgccagcatactgcatatctacatcacagggagctaacataaagacgatgaaccaagagagttctagttgggcattaatctagccatccaaatctaagcagcctcatgcacatatattacatagcatggccaacattgaccaaacatgttgcatcctatcttgaatctgttagttgaagacaaccagttctttccatcaggccactttcacgtttgtcttcagcctttttgcagcctgcacgaaaccaacgatgacctgcaacttatccaattgctgcgacacaaagtgcctctggacagcatccactaactgctccctggatgggttagggctagcatcgagattgaagtga

SEQ ID NO: 41542 - DNA, 511 bp, Oryza sativa
  Clone ID: uC-osroM202038d08a1
gtctcgctcacccgccagttccaccaggccctcgacgcctccattgccaagaacttccctgagaacggcatcatcgcctgcatgagccaccacaccgacgccctctactgtgctaagcagacggcagtggtgagagcatcggatgatttctacccgagggatccggtgtctcacacgatccacattgcctcggtggcgtacaacagcgtattcctcggcgagttcatgctcccggattgggacatgttccactctcttcatcctgccggcgactaccacggatcggcgagggcgatcagcggcggccctgtctatgtcagtgatgcccctgggaagcacaactttgagctgctgaagaagatggtcttgcccgatggctccgttcttcgcgcgtggctacctggccggccaacccaggactgcctcttcaccgatccggcgcgtgacggcgtcagcttgctgaagatttggaacatgaacaagttcacccgagtgctccgagtctacaatt

SEQ ID NO: 41543 - DNA, 418 bp, Oryza sativa
  Clone ID: uC-osroM202038d08b1
aattcaacaatgtcatcatatattttcttctgaaagaaaaaatgtcaccatatattccatccttcaattgagccaagaatcagatatgtgcactatcaaatcctatacctctccaaattcttacaaccaacatatgctgctcctgaacatcataatggactcacaagagctcacattctgatgtgtttgtgatacagtgataccactacaatgaatcttacaactcaacaacaatcttgtgaaccctttccttgggcatggtctccaggtcaaggatcaccagcccagatgaggaatcataggtgaactccacctgagctgagcctagcatgcactttcttggcctgactgaagagtaggcaccaaactttccacattccctcactttcatgcagaccaatccgatggcctgggagct

SEQ ID NO: 41544 - DNA, 323 bp, Oryza sativa
  Clone ID: uC-osroM202038d09a1
ccccaaaaggggggtttttttggacctaaaaccgtttgggttaaaaaactaaattttttttttttgttaaaaaccaccatttgttttttttgggccacccggggttttggttttttaaagggggcttttagctggttttttgtttttttggaaaaaatttgggggttgccttgggtttgggggaaggaaccagcccaaatggtttaatggcttttggaatacaagttttccatttaatgagttttaaactcttttggggttttttttcggaaaagggttttggaaccctttaaggaccacccttttgaaatcccccctttttt

SEQ ID NO: 41545 - DNA, 463 bp, Oryza sativa
  Clone ID: uC-osroM202038d09b1
tcgcttataatgactttcgtgaaagtaatcgagaatgaagcgttctttaaaagatatcaagtaaaattccgtcgtcgccgtgaaggaaaaactgattaccgtgctcgcaaacgtttaattgcgcaagataagaacaaatacaactccccaaaatatcgtttagttgtacgtttgaccaacaaatttgtcatctgtcaaattgcttacgctgaaatcgatggtgataaaattttagcatcagcttattcatctgaattaccacgttacggattaaatgtaggattaaagaactatgctgctgcatactgcacaggtttacttgttggacgtcgtttacttcaaaaacttggtttagatcaagattatgaaggaaacaccgaaattaatggtgaagttgtcaagactgagatcaatggtcgcacatacttcgtcaatgaagttgctgatgataaacgtccattcc

SEQ ID NO: 41546 - DNA, 404 bp, Oryza sativa
  Clone ID: uC-osroM202038d10a1
ggaacaaatatgtgagaaatttttataccaccacaaagcccccgctctttctttttttctctggactttgggcagaaaattccgcaataaaaccacaaaaaattttctgtacaaacaccaagatcatcatcatcatcttcttcttcttcttctccaccgccatcgtcttcgccggagtaatcaaatgattgatatgaacgagccaaacgaagattggcaatggatgcagcgatcagatcttcatgttggcgtacatgatgaactggagctccttgacgcagtcggccatggaggggcggccggcgctctcgaagcagacgcagcgggcggcgaggccggcgaacatggacaccgactccggcgtgtaggacgacctcgccatgtccctgtccaccaccttgggc

SEQ ID NO: 41547 - DNA, 482 bp, Oryza sativa
  Clone ID: uC-osroM202038d10b1
ttctaactccatcttcttctccccaaagatcaattgcgcagccgacgatcgtcgatcgatcgaatgcgcaattgcgggatcatcagtttttgtggcgggtttcttgatccataagtagctaagctgctgcccattcctttacttctttgccaaacgcctcctctaggtgtaggtggcgcgtctcccttgtacttggatccaaagagaccgtgtcgtctcgtctagagtaggtctctatctaggctctgatcttgagcctcattcggagaccatgtactaggctccattgccgatcttgtcctctcactctcacctgtccttgttgctcatgctcactcacagctcttcttgatcagttcatcagctcatcagggtcaaccttcggcagccattgttgtagcaggacattttgcctttttcatgtaaagttgcagtgtgaccttgggctggagcaaggaatatatctccccagttcttgatcg

SEQ ID NO: 41548 - DNA, 102 bp, Oryza sativa
  Clone ID: uC-osroM202038d11a1
ttttttttttttttttttttttttttttttttttttttttttttttttttttttttttttttttttttttttatactattattaaaattacatttttatctt

SEQ ID NO: 41549 - DNA, 494 bp, Oryza sativa
  Clone ID: uC-osroM202038d12b1
gcttgatctagaaagacttgtgttagctgcaggtcctatcggcctcatgcaagcatgccttgatgtagctgttccttatgttcgccaaagagagcaatttggccgtccaattggtgaatttcagttcatacaggggaaattggcagatatgtacacctccttgcagtcatcaaggtcatttgtttactcggttgctagggactgtgacaatggtaaagttgaccgcaaggattgtgctggtgtgattctctttgctgctgaaagggcaacccaggttgcacttcaggcaatacagtgtcttggtggcaacggatacataaatgagtacccaactggccgattgctgagagatgcaaaactgtttgagattggagccggtactagtgagataagaagaatgataattggccgcgagctcttaaagaggagtgaaactattattttggagccaggtatctgatatgtataacttggggagagccccattcgatggc

SEQ ID NO: 41550 - DNA, 208 bp, Oryza sativa
  Clone ID: uC-osroM202038e01a1
tttttggggtagattaggtaaatcatgtatatcttttcaacaacatgtacaagatcccttgttaatgggccactacatgcctacaataaccggatccatgcatgacatcacaaaatttttctacttgatcccaaagtttcaactaaaccactgatgatgatgagataaggtaaaaaaaatgaaactttaggagcctccctaacatgct

SEQ ID NO: 41551 - DNA, 469 bp, Oryza sativa
  Clone ID: uC-osroM202038e01b1
cgacgggttcgactgcaagcgatgcacgcgtgtcggacgagccggtctactgcggcggcggctgcgtctgcccgaagccggtggtggagaagggcggcggggtggtggccaggcggttcgggtgggcggagatcgagtcggtcacgggcggattctcgtcccgggtgatccggcagggcgggtttagcaccgtgtacctcgcgtggctcacctcctcccgcctcggcgccttcaaggtgcagcgcagcatcgagcgccttcaccgcgccttctgccaggagcgcgacgtgctcctcttccttcgtcacccccacgtgtttcgccttctcggttactgcgacgaacgagatgagggtgtattggggttcgagtacgcaccgaacggggacctccacgagaggcttccccaccggagcgggtgtaagagcccgacggtgctgccgtgggctccgggcatggccgaagggtt

SEQ ID NO: 41552 - DNA, 378 bp, Oryza sativa
  Clone ID: uC-osroM202038e02a1
agagagaagcaattccattcatccaaaggtaaaccaagccatccatgatccatccgtccaccatacatcaagcaaattaacccaaatccaacatcacctccatatccatatagaatctaaatttgttcgcatttcctacgtagataagatcactaggttgaacacagcatgataaaagaccatcctacttggggcatctatacaattgttgtttttgggtacccgactcatgataaaggcagagcattttcacattcactgatgaaaacgtatatgaacaccatgtgacccgatgcgaggaactcagtcggctgccctgaagagggtcatgagggagaggaagaggttgatgacccccaggtaaagggagaccgcggc

SEQ ID NO: 41553 - DNA, 472 bp, Oryza sativa
  Clone ID: uC-osroM202038e02b1
ctcttcgctccctcgcgccgccgccgccgccgccgccgcggggaagagctagccctagaggagaagtgggggtgagttgggagagaggagagggggctagatgttccggtacgagaagggcggtgacgccaaggcggggacctagggcggtgcgagggagctctacccggggatgacggagccgcctgagatgcggagggcgcttattcggaagatctacgagattctctccatgcaggttctgctcaccgccgccgttgccgacgtcgtcgacaaggtcccggccatgtcccactattttttattcttccaccccggcctcggaccttacatgttactcatcattcttccctttatcgtgctctgcccgctggtctacttaccaccagaagcaacctttcaacctgaatcctgctcggtcctctttaccgttatcataaactatgtggttgggatgacatgcgcctttacc

SEQ ID NO: 41554 - DNA, 446 bp, Oryza sativa
  unsure (1)..(446): unsure at all n locations
  Clone ID: uC-osroM202038e03a1
aacaaaatccacaatcttatttctgtcaaaaaacgagggattaaacttacattcataccttttgtataggccaccgatacaccctagatacagcttacaatgctcattgaaccctatatgcagtaacagtgtttctacgcgctacaaaactcttcgtaaactggtgaatactcaccttgatgagcccacagcccagtaaacaaagaagcagatcacctagtgtgaaaaggtaatctatgtatgtatacgtcaaatcatgaaaacaggaaatcttctatttcctctgtaacatcctaccgtatgcctttctcacctgtgcaaggggnaacttctcaacacaaaagggagtggattcggtatcagcaattagtacggcgagtaagagatggaggggacgggctggactgtcaagaggacaaacgtagtgcgatctatgaaggagcaat

SEQ ID NO: 41555 - DNA, 374 bp, Oryza sativa
  Clone ID: uC-osroM202038e04a1
aatgctgacacaaattaatttatttattgcaaaatagtttcctttccttttttttttccatttggttctcctggaagtcggagtaaataaaaagaaaaaaacaacaaaactttggtactgaaaaacgggctgaaagcctgtaacaacttaaaaaggaacataaataaacttattacagaatatgccggctaaaccttgtttaactcaaagaaaatagcgtgccaaacacatcatattaaactttcggcattgttgaagggttgaaaggagtggatggttcaacaagcgagatatcgggtcagccaaacttgcagggctgctgttgaacccctggacaggctttccttccatgcgggatgcatgcaaagattttc

SEQ ID NO: 41556 - DNA, 496 bp, Oryza sativa
  Clone ID: uC-osroM202038e04b1
ccgttcgccccctccttcatcctccggtagcagtcatggcgtcgtcggcgctaatctgcgacaccgagcagtggaagggcctccaggcgcacgtcggggcgattcagaagacgcacctgcgcgatctgatggatgatgccgagcgctgcaaggcaatgacagctgagtatgaaggcatatttctggattactcgaggcagcgtgcaactggcgagaccatggagaagctgtttaaattggcagaggcggcaaagctcaaggagaagattgagaagatgtttagtggtgacaagataaatagcacagagaacagatctgtgcttcatgtagctctaagggctccaagagacgaagtaataaaaagtgatggggtcaatgtggttcccgaagtttggggtgtaaaagataaaatcaagcagttttcagaaacttttaggagtggatcatgggttggggcaactggtaaagcattgacaaatgttgtgtcagttggaat

SEQ ID NO: 41557 - DNA, 446 bp, Oryza sativa
  Clone ID: uC-osroM202038e05a1
gataggaatgctgtagtaatgtcttccccttactgctgtagtggtacaactcacttgggcatttcaactgagaagagcatgccgacaagaaaattcatatgctttgcattgctttctcttctgcgaattgatgcaaggttatacattaatcatgacactgaaagaggcaaatttgcacttgacattccagaaaacacccagtaaagcaaaatgctttgaattctcgatgtccaaaatgctagtacaaaaggaaaaactttcacctgaaaaataaacatgctacatgggaactgaagagaggatgcatgcctaaactgctgcaagcaaaccaaatttcatggcaaacttcttctgattacagtcaagcatctcactgaggctgcaccttgaattcatctgcttgagcaccttgtggcggtactccaggctccttttgagaccatggc

SEQ ID NO: 41558 - DNA, 507 bp, Oryza sativa
  Clone ID: uC-osroM202038e06a1
agatacataagaacagttatgcaatcaaccggtataatacaggcccaagttcaggctatctgataaggaatacaaatgttgtttctttagacaggccttaagaaaaattgtcactataacaataatccatgctcattcgcccaacaagtgggcataaaattaatagatgcacaaagcaaggggatttggcttttctagagctaccgatcttcagatgccagcattgataaattgctctgagctcttagtagggaggatccggattaaatgccaaggattccctccagatgagttcttttatatgttcttcagtaaaggatggttgctcaaaatcaaagctgaaaggtgctgggcaggtgggttcttcattgatgtcatgaagagaagccaagtatgggtgatgaagagcctcatcaacagttatccgtctgcttgggtcaaacaccagcattttctctaacagatcgactgcaccagcagacatgttgcggaagcgcaagcggaagt

SEQ ID NO: 41559 - DNA, 396 bp, Oryza sativa
  unsure (1)..(396): unsure at all n locations
  Clone ID: uC-osroM202038e07a1
gaacagctgaaatactgagttgccttacattatatgctacgaatataattaaaatgttcaccgcaaaagaatgtaattggaatatatccgtataaataacatcccatagtatgtgtaacaacgacccctcaaacaaatgactaaaataacgggtgtcacaaaagaagaaaaaaattcacaatttacgctgctgggctggcttcttcgcaggcaaaataaggcttcacagttccatcgtatcagcagctagcgccagcactgaagtagctaataaacagtggcataacttagataaaaaaggtcttcatctacacaaaaagaagnatcccattctagcccccctcaggtatttacacaagggggggtagaccttgattgattgaagttcatcttcgt

SEQ ID NO: 41560 - DNA, 406 bp, Oryza sativa
  Clone ID: uC-osroM202038e07b1
tcggatatagtgtcatgctatgtttctgacgatggttcagctatgttaacttttgaggctctgtcagaaactgcagaatttgctaggaagtgggttccgttttgcaagaagcacaatattgaaccacgagctccagagttttactttgctcaaaaaatagattacctgaaggacaaaatccaaccttcctttgttaaagaaaggcgggcaatgaagagagagtatgaagaattcaaggtacggatcaatgctcttgttgcgaaggcacaaaaagtacctgaagaggggtggaccatggctgatggcactgcttggcctgggaataacccacgggatcaccctggcatgattcaggtgttcttggggcacagtggtgggcttgacactgatggtaacgagttgccac

SEQ ID NO: 41561 - DNA, 141 bp, Oryza sativa
  Clone ID: uC-osroM202038e08a1
ttggggttttcaggacaaggggcctatcatcaaaaggccaatacttccaatatacggtcaaacagtaagaccaggtcaatttaatgacagactaccctccttgctcgtacaaacatggcgctaatttgatcctgctttgtc

SEQ ID NO: 41562 - DNA, 406 bp, Oryza sativa
  unsure (1)..(406): unsure at all n locations
  Clone ID: uC-osroM202038e09a1
ggccgatcaatatgcagatgataaaattcagaggaaaattatacaaatccatggagatgagaaaacaaatcacatgacagctcgtaattacagtactaagtacacgatggaacggaacaacaaccccatatcatcatcaccatcatcatctagctagctagcaaaccactcatctctttcacacacatgcatgccggccgtcagacgaaatgatcaagaaacaagaatcatatgcactgcctttatcctggcagggggngcccgatcagaaaagggcccagcttgacgaggacgcccgcggcggcggcaaccgcggccctggcctgcaggccggcggacgcgccgccggtcggcttggagggggaagaaagggtggccggcggggtgcccctgcttcctggggtgg

SEQ ID NO: 41563 - DNA, 133 bp, Oryza sativa
  Clone ID: uC-osroM202038e10a1
tttgggtttttttagcttttgggggttttcccccttactgttgtagtttttttttttttttttttattttttttatttataagtttgcccccaaagaaaactaatatgctttgcaaagaataaagaccccccc

SEQ ID NO: 41564 - DNA, 362 bp, Oryza sativa
  Clone ID: uC-osroM202038e10b1
gaccggaccggaaggccggggcagacccacgcgttcgccctcatagacgaggagaggcgacaatggaggggcaggaggaggacgggcggaacgagacgaccaggtaccaggggaggcagccgaaagggacagagccgcaggccgccgcagacgacaaggacaaaagggagccaccagcagggccgctggccgagccaggggagcgtacaagaaccctcaccggaccggaccgcgatcaggccagtcgagagcgcaggaatacccttcctaaacatgaccaagacgaccggcatgggggtcagcaagagctcacccaagggcgccacgggcggaacccaggggatagcctgaagcttcggcag

SEQ ID NO: 41565 - DNA, 490 bp, Oryza sativa
  Clone ID: uC-osroM202038e11a1
gattaaaagcacttcaaatttaggaataacatcaaaccaccggataaaagggtcagattctgaatatcaaaattgcaagattttcttgatacacttcctagtgcaaaataagcttactttaaaatatcatccaaacacagtgcgctaacaatgagctcatggaactagttcatccttctgatgagttcgttgatgtagttctcacggttaccagcatcaccaccctcaacgtagtggttcctcttcttcttcagcccacccagtggtgccttcagcttgaatggccagaggaagttgttggcctccttgaaatgtgggccaacagtcatgatctcatgaacaagatcctcaatgcagatgatgtcatgcttacccaaaccctcctcgatgactttgttgtttgtaagagggattctttgcttgttgagctttccatagcccctcttgtagatcaattcacggacactcttcaaattgggtacccatatgc

SEQ ID NO: 41566 - DNA, 388 bp, Oryza sativa
  unsure (1)..(388): unsure at all n locations
  Clone ID: uC-osroM202038f01a1
aaaacgcactaataagaaaaacacaaaaaaaacaaacaaacaaaaactagaaaccttataaaacncaccttttttttttttttttttttttaaaatttttttttttttaaaaaaaaaacaattccaatcaaccaaaagtaaaccaaaccaaccaagaaccaatcgtccaccaaacaataagcaaattaacccaaaaccaaaaacacctccaaatccaaaaaaaaactaaaattgttcgcaaatcctacgtaaaaaaaaacactaggttgaaaacaacatgaaaaaaaaccaacctacttgggggaattaaacaaatgttgtttattggaaacgcgactcaagaaaaaagcaaaaacaatttaaaaaataatgaaaaaaacgtatatta

SEQ ID NO: 41567 - DNA, 122 bp, Oryza sativa
  Clone ID: uC-osroM202038f02a1
agagagaagcaattccattcatccaaagggaaaccaagccatccatgatccatccgtccaccatacattaagcccaattaacccaaatccaaaatcaccctccatatccatatagaatctaa

SEQ ID NO: 41568 - DNA, 204 bp, Oryza sativa
  Clone ID: uC-osroM202038f03a1
aataataattgccttaattactttagcaattgggttgttacatagactgctccggcgagcaatgatcaccaagaaattccttctggtgatcccttgatccttgatcatttattcactacacactaacatacactgcacccgaggctttcatcagggtgctctttggctgaatttactacgggcatttttcggtgacagccagca

SEQ ID NO: 41569 - DNA, 310 bp, Oryza sativa
  Clone ID: uC-osroM202038f03b1
ttctttttttttatttattgttttttttttttttatccttttcactctttcattttattgttttttttttttcatgttttctctattcatattactctcctacaccaaaagacccaggacgcacgagcgctgcgggaaacgacaagccgacgaagaaggcggaggacccggaccactgggagggagacgtgcaagtggggacgaccatggagaaagctgtctaaaccggcgagaaggggcaaaactcacaggagaagattgccaataggccctggcgcagacaagataaatagcacagaaaacagacccg

SEQ ID NO: 41570 - DNA, 497 bp, Oryza sativa
  Clone ID: uC-osroM202038f04a1
ttcggcgtggtccaccggtgcacgtcgcgcgccaccggcgaggccttcgccgtcaagtccgtcgaccgctcgcagctggccgacgacctcgaccgggagctcgcggagctcgagcccaagctggcccagctggccgccgcgggcaacccgggcgtcgtccaggtgcacgccgtgtacgaggacgacgcgtggacgcacatggtcatggacctctgctccggccccgacctgctcgactggatccgcctccgccgcggcgcgcccgtcccggagcccgtcgccgccgccgtcgtcgcgcagctcgcggaggcgctcgcgcactgccaccgccgcggggtcgcccaccgcgacgtcaagcccgacaacatcctcctcgacgtcgtcgacgacgggatcgacggcggcggcacgccgcgcgcgcggctcgcggacttcgggtcggccgcgtgggccggggagagcggcggcagcgcccagggccctctggggacgcccca

SEQ ID NO: 41571 - DNA, 464 bp, Oryza sativa
  Clone ID: uC-osroM202038f04b1
atctcgagtttccgccctttttttttttttttgaagccgaagcagagcacaagcccgatttttattcaactccgatcgatttgtacaaaagcttagtacttacgttagcgtatatacaacctgactcatcatcatacaaaaaaaaacaaagcgaaaattaaggctctctgatctctctagagacagagcaaacctggaaccgtgaaagaaaaaagaagcctagcatgactgcacgagcttcttcttcaatcaatactctgattattctctctactgcagatctgcaataccgcgacaccctacagcggatccgctgcagggatctctctctaccgtctcgtcgtatatacaaaaccgtatagactacggctgtaaaatatcgccgtatctccctaggactacggcgacacgtggcaccgactgattcgctgcctctgtctgccccctcttgacgtggacgcggc

SEQ ID NO: 41572 - DNA, 497 bp, Oryza sativa
  Clone ID: uC-osroM202038f05a1
gtcactcatagaagtaataggtgatcctgaataaaatctctgaatgtatcaaccaacatacagtcatatatgatctgaacagcagtaagtaagccgtacccaaaagaaaggggaaaaaactaagaagaacaagacatggatcgataatatgtgcatgacaagcgctagctacaagggctagaagatatgtaaccacctaaaccacagcgatgtacagcaacatccggcgagctaatccctcatcaacaaatcgaaagaaacaaaagaatccatccgtccatactggaagcagtgctggctaatagtaatccccaaatgcgaagcggaaccaaccatcgaaatcagaaccagactttgcagtcggtgcgctggaatgcgggggcgttgggggcggacgctgggacggtgatggggcagctgatcttggccttgggtccgggaaccttgaaggcccagaccttgaccctgagcttggcgttgagcttgacctcgatgtc

SEQ ID NO: 41573 - DNA, 413 bp, Oryza sativa
  Clone ID: uC-osroM202038f06a1
ggcactcatagaagtaataggtgatcctgaataaaatctctgaatgtatcaaccaacatacagtcatatatgatctgaacagcagtaagtaagccgtacccaaaagaaaggggaaaaaactaagaagaacaagacatggatcgataatatgtgcatgacaagcgctagctacaagggctagaagatatgtaaccacctaaaccacagcgatgtacagcaacatccggcgagctaatccctcatcaacaaatcgaaagaaacaaaagaatccatccgtccatactggaagcagtgctggctaatagtaatccccaaatgcgaagcggaaccaaccatcgaaatcagaaccagactttgcagtcggtgcgctggaatgcgggggcgttgggggcggacgctgggacggtgatggg

SEQ ID NO: 41574 - DNA, 407 bp, Oryza sativa
  Clone ID: uC-osroM202038f07a1
aatatccgtgctgtttatttgattgtgtgtgcatttacaccatttacaaataaaaattctgtggaaaaaaatgaatcaattcattacaatcagggcaaaataagactcatctgttctctttatctcacagaaaggtacaacaaaccgacaaatttatgtgcaggctatttacactgatgcacaaatatggaaacgtttatagcagaccatggaaaacaagaacactctctcaacttcctatggattgtaacttacacagataacctaactatgaagatacttgggattcggaagaccattggaattcaaatttccaggttcctatcaggaccggttttactctcctgggagcaaggtgcattcgccagcaacgggaggccaacatgacaaccccatcgatctggatt

SEQ ID NO: 41575 - DNA, 254 bp, Oryza sativa
  Clone ID: uC-osroM202038f08a1
gagccactgcacacggtgcagtgtcagttgtagcattcacaacataccgagtttctttttaggaggtaaaactctacgagtctcacagcatagtaaaacgtagccagctattactagatacgagtagcattttttaagtcgcaaacaaaagggatacagtcccggcttaaggggtgtaaaatcagcttcactatcttcatgttcgccgcaacggggaaacaggagcacattcatctttggggtccaaaaattta

SEQ ID NO: 41576 - DNA, 340 bp, Oryza sativa
  Clone ID: uC-osroM202038f09a1
cttcgtgctgctgacctaagagatgttagaacaccacaacacggagcaaaccaggttgtgcctgcgtgtagtggaggccttcctccagaagaaactgctcgacggcgatgggcagcctggcggtgcgagaacccttggtgtgatgacctgtcccgacacatatcatgacttgcatcctctcacctgtagccctcgcggtgctcttaagagtaccgagctcgaccttaagtatatggaatgcttcgttcacatggagaccatgtagatcgatcagacggttcgctccctcgttgcgaagatgggtttcccttgtcgataaaatagcttcttttgctttctc

SEQ ID NO: 41577 - DNA, 385 bp, Oryza sativa
  Clone ID: uC-osroM202038f10a1
aaggggaaaaaaaaattttaattttaaaaaccttggggaaaaaaaataaaaaaaaaacaaaaaaaaaaaccccaaaaaaaaaaagccccccggggaaaaaaaaacagaaaaaaaggggttcataaaaaaaagggggcctcccttctaaaaaagcaaaaagtctggtctaaaaaaaataaaaaaatttaaaaccccttttttttggggaaaaccacaaagggggaaaaaaaaggaaaaaaaaatttgcctataaaaaacctttaaaaaaaactttgttttaaaaaaaaaaaagggggagcccaaaaaaaatgcccccccccaaaaaaacccgaaaaaaaaaaaagcttttttggggggaaaaaaaacaaaattttatttccccctg

SEQ ID NO: 41578 - DNA, 463 bp, Oryza sativa
  Clone ID: uC-osroM202038f11a1
acagaaatcacagtacatatatagatgtacgtacacacatacactggtttggaataaggcgcgcggccgcggcggcgaaattgtgggtgagcaacgtatatacgtgtacgtacgtacatccttgctcatcttattgtaccgtatatatacgtacgtagtagccagtatttatttagtggtacgtacgtacgcatggattattaataatttgggggtgattaataattaatcagttgcagtagtagccctgctgctgcggcatcctggcgtagccgtactgctgctccttggcgccgtagctggcctgcttctgctcgcggtgctcgtggtaggcgtagccgccggcgcccaccgccgtcaccgacgtcacgccctgctcgatcctgtgcctctgcgcgttcgccgggttccttttttgcctggtgcccctcatagagagcgaaggcgccgctggcgagggcgc

SEQ ID NO: 41579 - DNA, 440 bp, Oryza sativa
  Clone ID: uC-osroM202038f12a1
gaaaagcctaatattgcggtctctgcaatgatattatctccagactgagtcttagtaagcaaaactcatagtgttcagcatatgctgaaggattgctaatctgaagaaaaattcattcggctgcctgtttcaaatgaccaagattccaaaaacaggcaggaccaacgagtaaaaactctttactattatctatgcatatgcggatctcctatatactgaaaaaggaaaatagctatatatgtatctcaacatatacatcaaatgagcatcctcatgcattgttcatcgttcctccagcttcatcttcgttgctggagctaacatgaacaatgcctattgtgcatcgtcctcttcatcttctcaaggatcccagaagctttcctccttgccctttgagtgccagtttgtgcgagaaaagtgagggagccgtttatgctctc

SEQ ID NO: 41580 - DNA, 490 bp, Oryza sativa
  Clone ID: uC-osroM202038f12b1
tcgctttctcccctcgccgccgccgcgacgcgacgcgtccccatcaccgacatggcgaagccggcgccggcgccggcggccggggcgcgggaggacgaggacgcgccggcgctgcggaggcgcctgcgcaggctcgtggcggcggccaccgccggcgccgcctcggagtccgtgctcgacgaggccgccgcggcgctcgcggcgctgcgggatgcggaggtcggcgtcgggaggaagggcgccggaggaggagaggaggcggccgccgccgccgtcccggcgctgttcctgtgcccgatctcgtccgggatcatgagggaccccgtcgtcatcgagtccggacagacctatgatcgtcgttccattcaggagtggtttagtgcaggaaaccagatatgcccgcagactcaacaagtgctctcacacacaattgtcattcctaaccaccttgttcgtaccatgatctcacagtggtgcacagaaaatgggc

SEQ ID NO: 41581 - DNA, 400 bp, Oryza sativa
  Clone ID: uC-osroM202038g01a1
gaacgataaacaccaggaaccggcgtttatttgaggcaagcactgcccaaaatctcgcaaaagtactgaaaccttagacatagtacacattcatggcaaacatggatgccaaatgacaactacggaaaattatcaaattcgaatgcagctgacggcttctcctgctgaagatgcatattttcccctccattacttggaagagctttgttcatcgacagccaatgggacggcgctggccaggctgcggtatttcagagcatagaacatcttaatgtaacggcgagtcttgcgcctctcaaggttgcttacgtacttccagaattcgtatacaccagtcaaggtcatcagcctttcagagtacagcttttcaggtgtacttttcgtaaattctttgcagacc

SEQ ID NO: 41582 - DNA, 416 bp, Oryza sativa
  Clone ID: uC-osroM202038g02a1
gccgctccgacggcgcccccgtcgccctcaaggaggtccacgacgccgtcagcgcccgccgcgaggccgacgccctcctcgccgccgcgccctcccgccacgtcgtcgccctcctcgaccacttccccggcggggaccacgacgacgacgtcctcgtcctcgagtggctcccgctcgacctctccgccgtcgtccgcgccgccgccgccgccaggccgagcgccctccccgccgcgcagcgcaagcgctggatgctgcaggtgctcgagggcgtcgccgcgtgccacagcgccggggtcgtgcaccgcgacctcaagcccgccaacctgctcatcttcgaggacggggttcctcaaggtcgccgaccttggtcaggccaggatacttcaggagacaggaacataccaaggtatgca

SEQ ID NO: 41583 - DNA, 385 bp, Oryza sativa
  Clone ID: uC-osroM202038g02b1
attcatctcattaccaggaaagctggtgctgttgtacacaacataatgaacatatcgcagtttacaaatagtaaaacaattatcaaaatgccatacaatatgctgcgacagaaattcctctgccagcatgttcaggaagatacaattaccctcatcaatcattcttgatcacgagaagcgtatgctgaaacccttgtcggtcttggtgacatccatgctgccgaattcatcgaagtctgaatctgaatctccacccctgaaattagcccattcttctgtgctgtcatcatcttcatcctttgattctgggacttgtaatccttcaataggtacaggtaatggttctttggcgaagtatggatcattcagcaagtcggcagcactg

SEQ ID NO: 41584 - DNA, 371 bp, Oryza sativa
  Clone ID: uC-osroM202038g03a1
aggccatagtgtttgcatgttatactttgtagattaaacattcacaaaagattgtcccttttatcagttcttttagagagataaaagggggagaaaatcgtccctatcagagctgacaaaggcattacattatcctgtcgcatgcatcctaatttggctcatcttttctgcaaggggatgatgcttagctgggaatagcagtatgagtcactagcagaaacctgctggtgaaaggaatggaggcaaagataccatgtcttaggatatgctcaggtgtccatcactccatcttcttcttgctctagattaattcccccagggtggcaggtactgtggtcgccgtcacagctagcaagataaggctggctggc

SEQ ID NO: 41585 - DNA, 355 bp, Oryza sativa
  Clone ID: uC-osroM202038g04a1
ggattaaagcaataccatatatcaagagcaactggtaaatgcatgcataacatgcaacataatgaacaaaaacttcagttcgcacagacaaaggttcttgagatgctgatctcaattctcaactataaaatagcagctaaatagcacggtcgatcttcagatgccaactctccaggttcatagtgacaaggcattttagacctcatagatccatgggtgctggttgctcctccactcggcgatgccctcagggaaccacagagcaatctccttcctggcgttcttgaccgagtcgcttccgtggatgacattcctgccaatgtcgacagccaagttcgccacgggatggtgcccg

SEQ ID NO: 41586 - DNA, 507 bp, Oryza sativa
  Clone ID: uC-osroM202038g06a1
cccgcaaatacttattcatatgttttgacaacatttctcccgacgcatgctcattgtggcagacgcagctgaccacctagagcttttagttcaccattattatttagaccaagcatacgtcccaagatcagaacacatgcttacaagcgaaaatactaatagcctggctggctgcttcacagaataaccaaacgacaacctcaacagataaaaatgccacggaatgaaaacaaagcagcgaatcgtcaccagaagtcccatcttactcatcaaacactccatcattctcctccaacgcatcctctccccaggggagaagattgcccagtttaccttccttaacaggagcagggttcaccatattctcagcctcgaagcagtgcagaacagatttgggcgacccaacagcaacaggtacgtcttcagtagcgtcgaagctctggtagatgaggaggccaccacagggcagctcctgctctaccatgttgttgcatttgtaagcatcag

SEQ ID NO: 41587 - DNA, 465 bp, Oryza sativa
  Clone ID: uC-osroM202038g06b1
ctttcttgtttaagaactcccccccctcctcgctccccgccgccgccgccgttttcttggagaggagaaatccgtaggctcagaggatttttggtagtcttgctccgtgatattcgcgaagagggggggagctaaggggggattcgtaagatcagaactggatcacgcgggggcgcgctcgggatcgggggttccaaacacagcttcttcgttgaatttaagtggatgtactaatggagtcaaagggtggcaaaaagaagtctagcagtagtcgttccttgatgtatgaagctccccttggctacagcattgaggacgttcgacctgccggaggcgtgaagaagttccagtctgctgcttactccaactgcgcgaagaagccatcctgatagccctttcggcttctccatactagtagtttaggatttcttgcaattccattttggcacttttcttctgacctat

SEQ ID NO: 41588 - DNA, 372 bp, Oryza sativa
  Clone ID: uC-osroM202038g07a1
ggggccagtatcacatatggttccttcatattgaaagagacagtattacagatgcggttacacaacaacctgaaaaaaaaaaagaacaagacaaactgatagagcaaactgcaaagctctcttgcagtttcagctgactcaaaaaaatgaaaaaaggataaaacgccgaaaatatctgaacactaaaactctggctgctacaccgatatcactagcaacttcgcaagtcgatttcaaccctttcataatcttcccatcttcttcttcttccatggagcaaccagtcactactgatcaaagacacattaggtaggcggcggcggcgccgacaacggccggcaatggaggtagatagccagagagagacccccc

SEQ ID NO: 41589 - DNA, 470 bp, Oryza sativa
  Clone ID: uC-osroM202038g08a1
gctggagtgcgggcggatcacgttcccttcctcgctgaagcagcctggaccaagggatgctccgatgcactgcttcatcaggaggaacaaaaagaactcgaccttctacctttatctcagcttaacacaggccctaacggataaaggaaagtttctgctggctgctcgaaggttcagaaacggggcacatacagaatatatcatttcctatgattgtgatgatctatttccaggaagcaattcgtatgttgggaaactgagatctgacttcctgggtacaaagttcatcatctatgatagccagccaccatacgatggtgcaaagccctcacggagccaatcgagtccgtcgctttgcaagcaaaccgattaacccaaatgtttcaggcggtaattatgaagttggaccagggtcatacaagttcaactttctcaaatcaagaggaccaagaagaatgcagtgcaatatc

SEQ ID NO: 41590 - DNA, 406 bp, Oryza sativa
  Clone ID: uC-osroM202038g09a1
acttgctgtaagacagtttttaatatggaagcagtaacatgctatcatacaaatgaagttacacacagaaatgaatcttaataggtcttgcataactagaaatggaccttacatgacaaaattacatatatacacaccaaaaaaaagggacaaaaaaaacaagaggaaccaaattatccacgtttcctttctttgcagacctgagtaattcacaacatacatacagatgatgaaatgcttcagttatactggcaatcccacttcttggttctttttgcaacaaccaaacagcgagaagagccaggtccagaagcttccccgatctgttttcttctggtttgttcctcttgcagcattcaaatcattcatatacttgaccacagcctgagcccctaactttacaact

SEQ ID NO: 41591 - DNA, 485 bp, Oryza sativa
  Clone ID: uC-osroM202038g10a1
gacggcgcgtaccactacgagctcggcagggcgctggtgccgctccgcgacgacggcgtcctcgtcctcggctccggcagcgcgacgcacaacctccgcaggatggggcccgagggcacgccggtgccgcagtgggcggcggagttcgacgggtggctgcaggaggcgctgctcggcgggaggcacgacgacgtgaagcggtacgaggagaaggcaccgcacggcagggtggcgcacccgtcgcccgaccacttcctcccgctgcacgtcgcgctcggcgccgccggtgagggggccaaggcggagctgatccaccgcagctggagcaacgcctcgctctcctacgcctcgtaccgctttaccaccgccaagaactgaaaaccggtcgacgcgatgcacgccggctcgccgcatgcaaccacgtgtttgcttgtaacatatttgactcgaacaataatccccgtgggctcacgtagaactgtgtg

SEQ ID NO: 41592 - DNA, 340 bp, Oryza sativa
  Clone ID: uC-osroM202038g10b1
ggggccaaataagaacaccaattaacgccataagggtgtgccacggcccaggcccaggcccaggcccaacccaattttacaaaaaaaaacaagttaaaaaccccaagccacgggtccgaaaaatacaaacacgaacacgggacacacgtttacgtgagcccacggggattattgttcgagtcaaatatgttacaagcaaacacgtggttgcatgcggcgagccggcgtgcatcgcgtcgaccggttttcagttcttggcggtggtgaagcggtaccaggcgtatgaaagcgaggcgttgctccagctgcggtggatcagctccgccttggccccctcacc

SEQ ID NO: 41593 - DNA, 426 bp, Oryza sativa
  Clone ID: uC-osroM202038g11a1
aaagaaaaggtaatcatctatgtataatcagatgaacaaatcaatagaacacaactcgatcgacctcttcccttgctgcagccatggctcatgcgtgtagagccatgcgagcaattaagggaaaattttgtaaaccacctaaattatctacaattttgatgaactaattaatttacaagcctatacatatgcaaaccaagatgattttaagctcatttcggaatttctttttcgattattacgccgtgcaagtgcaaggtcgcgagaggaaaaccctaattggcgaccatgcatcatgcacagcgactgcgtcgccgtcgccgtcgccgttgctccggtgagatttgtatcattattggtgctgcgacggcagcggcccgaagatgtcgaggaaggccgaccggccagccgagcgccccccgggcg

SEQ ID NO: 41594 - DNA, 467 bp, Oryza sativa
  Clone ID: uC-osroM202038g11b1
ttgctcaccttgcaccacctgctccgccgccgccgccgccgtcctcgatccatccatggccgccgcgagcttcgacggcgccggcggggcgctcggcgtgcacgcggcgtcgcgcaagatcgggaaatcggcggcgcatcagcagcagcggaagccggtgatcatttacatggtgtcgcccaagatcatccacgtcgaggcccacgagttcatgtcgctggtgcagcggctcaccggcccgggggcgtgcggccgcgggcgacggcggcaagaaggcggcgtcgtcgtcgccgagggaggcgcgcaggggggcgccgccggtgcgcgtcaaggcgcgggccctgaaccggcccgccggcggctcggccgtgtccgtgtcggtgacggcgacgatgcggcagcagcagcagctcgcctctccgtcgtcggcggcggcggcgtgccgcttgccgtcgccgtcgacgggg

SEQ ID NO: 41595 - DNA, 489 bp, Oryza sativa
  Clone ID: uC-osroM202038g12a1
tttttggtaaagaaaaggtaatcatctatgtataatcagatgaacaaatcaatagaacacaactcgatcgacctcttcccttgctgcagccatggctcatgcgtgtagagccatgcgagcaattaagggaaaattttgtaaaccacctaaattatctacaattttgatgaactaattaatttacaagcctatacatatgcaaaccaagatgattttaagctcatttcggaatttctttttcgattattacgccgtgcaagtgcaaggtcgcgagaggaaaaccctaattggcgaccatgcatcatgcacagcgactgcgtcgccgtcgccgttcgccgttgctccggtgagaattgtatcattattggtgctgggacggcagcggcccgaagatgtcgaggaaggcggaccgcgagcccagcgcccccggcgcgccgacggggctgaagaaatggtcgccgacgggctgaaaccagccggcgcccgggg

SEQ ID NO: 41596 - DNA, 467 bp, Oryza sativa
  Clone ID: uC-osroM202038g12b1
ctttccttgcaccacctgctccgccgccgccggggccgtcctcgatccatccatggccgccgcgagcttcgacggcgccggcggggcgctcggcgtgcacgcggcgtcgcgcaagatcgggaaatcggcggcgcatcagcagcagcggaagccggtgatcatttacatggtgtcgcccaagatcatccacgtcgaggcccacgagttcatgtcgctggtgcagcggctcaccggcccgggggcggcggccgcgggcgacggcggcaagaaggcggcgtcgtcgtcgccgagggaggcgcgcaggggggcgccgccggtgcgcgtcaaggcgcgggccctgaaccggcccgccggcggctcggccgtgtccgtgttcgtgacggcgacgatgcggcagcagcagcagctcgcctctccgtcgtcggcggcggcggcgggcccgtctccgtttccgacgacggggtttc

SEQ ID NO: 41597 - DNA, 225 bp, Oryza sativa
  Clone ID: uC-osroM202038h01a1
aaaaactatcaacagatacattatcaaagttccatatctgttgcataccacccgacacagcaaaatatatagttccacagcacaacactaccaacaccgatactagatgtgtaacaaacacatcatatttctgacttgtcttataactctttaacaatagtagaacagctattagaacaggtaaattaatggcaaaaacatatgcgagaccaaaaggggtttttc

SEQ ID NO: 41598 - DNA, 287 bp, Oryza sativa
  Clone ID: uC-osroM202038h02a1
aaaagaagttcacgatgcctcagggctcaggcagacagaaactgaaaacgacgcagcaagttaaaaacaaattacaaaacctacatgagacaaaattaaatcgcagagatagggtcccactaccaccaaagcaacattatttgcagaggttcctttttttcagcccacatgatcccgcggcctagttattattcgaaaattttccgtccggcctcaaatttcgagtcgaatttttaaatctcttctcttcctagaagagctttgaatagaatttcctcccgtgcgtg

SEQ ID NO: 41599 - DNA, 333 bp, Oryza sativa
  Clone ID: uC-osroM202038h03a1
gcgcggtgatggggtggttgctgaaagcagccgcccaaagcgaagggcaacctggccatggatgcctaaaaggccacagcaaggatgaatcccgttaatcgtccacgaccacgacaactgagatgcagacgtgaaggccgcacacgcgctcagcatctcaaaactgcggtacaagctcaccaaggagaagaccaggtccatactatcccggaagtttaaagctttaacttccatgtttgcagctggttgactatactgcagattccctgtggggactgacatgcacactgtgttagagactgctacactcggaggtacactttgtgtaaatta

SEQ ID NO: 41600 - DNA, 123 bp, Oryza sativa
  Clone ID: uC-osroM202038h03b1
ataagtaaagctgaagctcctgcacgctagccggtcccgaatcgcagtttcgacccacgcttccgcgctcgagttttactgctatccctctagttgctcgtccgggtcactctgaatctaacc

SEQ ID NO: 41601 - DNA, 500 bp, Oryza sativa
  Clone ID: uC-osroM202038h04a1
ggaaatattatataagggttttatttcactttgacaatcacattttcaacagaaaagcaaccacgaagcatgactgccagagagaatttcggtggcgatgaacaaagaaccatatcatcagttacaattgtcttccaagcaaagaataacacattaacaactagcacacttcctctaccactatgtcatcatcatcatgcatccaaggggggcaaagcaccgaattaacagtgtcactgaaacatgaacaagaaagaaacaagaaagaagaacaaatccctctcacaaacacaacctccacagcaattttccaatctttccttcccacaagcccatttaatcatcatcataccctcccccttccctcgccggaatcggcaaccgcactcatgccttcccctttctccatgcccagcctcttctcgtcttccattcccttcagatgcccagcagcctttaacgccccgatgttgctcacattaccaaagatcagaacaatg

SEQ ID NO: 41602 - DNA, 408 bp, Oryza sativa
  unsure (1)..(408): unsure at all n locations
  Clone ID: uC-osroM202038h05a1
ggtagtacaaccaacccatccaattcaattttcgatggttttaaaacatgtcaatttacaagtttaaactagctatcaaattgtacgaaaaacaaccttctacaaccattttctgtatcacccaataaactcagaacttgcaaataaccacaggaacaaatggacttgactcctcgcaatccatttgtatatttgtnggtcctgtttataataaataagtatgcacttttgagcaaattagaagggcataatggttaacagaaccaaatatcttgtgacttgtaatgacaatgctggtggcaatggcttgaaatcttgtcaaccccaaaactttagctgaaacttttctgagttttctgatcatttgcaatcggaataaatcctcaaaggagggggccaatgcacatg

SEQ ID NO: 41603 - DNA, 482 bp, Oryza sativa
  Clone ID: uC-osroM202038h06a1
gtagtacaaccaacccatccaattcaattttcgatggttttaaaacatgtcaatttacaagtttaaactagctatcaaattgtacgaaaaacaaccttctacaaccattttctgtatcacccaataaactcagaacttgcaaataaccacaggaacaaatggacttgactcctcgcaatccatttgtatatttgtggtcctgtttataataaataagtatgcacttttgagcaaattagaagggcataatggttacagaaccaaatatcttgtgacttgtaatgacaatgctggtggcaatggcttgaatcttgtcaaccccaaactttagctgaaactttctgagtttctgatcattgcaatcggaataaatcctcaatggaggggccaatgcacatgacttcatcagccctttgtttcacattgggcctagcaatgctaaatgatgccagaccattattagtgatcttgccacattcatg

SEQ ID NO: 41604 - DNA, 104 bp, Oryza sativa
  Clone ID: uC-osroM202038h07a1
aaaaaaaaaggggggtttttaaaaaaagtgggggtaaaagacgcccaaagatatataaggaaaataaaacgaggaaaaaaaaaaattttgaaggaaaaaaaaga

SEQ ID NO: 41605 - DNA, 356 bp, Oryza sativa
  Clone ID: uC-osroM202038h08a1
tttgggtttttttttttttttttgttttttgacgcccaaagatatatatgaatatatatcgggtaaaataaaaactcttgttggaattcttgtatacaactattttataaaacccaaagaggggggcaaaaattaatagagtaaatatcagctgttcttcatcaatcaagagctccctttgggtatacatgcttctttgttgatgaacaatattatttgcgaacagcttaaatatgtactaaaaaaccattttatttgaatcaaattaagcaaacgaaggggaaaaattaattgaaagaaagaacctctttttttttggttagctaggtttgctatgagccttttgatgatcatgc

SEQ ID NO: 41606 - DNA, 415 bp, Oryza sativa
  Clone ID: uC-osroM202038h09a1
tttttgttgacaacacaccaccagtgagaaaccttctactcaagttggcacacgccgtttacacaaaccacactgtacagaggcgaaagaaaaaccaaaccctccctgcctgccaacactttcagctgaaactacttattcaacaaacaaaaaaggcactttgccctctcttccaacatcagcatcatcaacaaaacccatggtttatactaggctctttttttttcccacatatatatgtatactttgatatcagatcagatgtatcaaatgcctagatttcatacgtgatcccaaccttgagcagctgatcgtttggaatcgccagtgccctgtgcccttctgtcaggttcttcctcaggaaggtgtagatgtagttcaccgcgatcctcttgaggatggacgagttgggccc

SEQ ID NO: 41607 - DNA, 405 bp, Oryza sativa
  Clone ID: uC-osroM202038h10a1
acagcaaccaatttattttcatattcgttgcacgtgaccaaacaaaaataagaaacaaaaggtacatataatttttataaaaaaggtaaaaacaaacacaaaattatatccgaggagaacatcactgtatacatttataacagcaagctaaagtacgcatttccttttttttttccgataacggaattcagtccactgaagctgcgaacttgcgtttgcagcaagacgatctacttgtccttcttgcgcttctcgacgacgaagaagaaggcgagcgcggcgatggagaaggtggagaagacgccggcggcgaccttgagggaggcgtggatgccggtgatcccggcgacgtcgaaggcggcgtccggcgagctctgcccgtaggccacctccgggccggacgcg

SEQ ID NO: 41608 - DNA, 440 bp, Oryza sativa
  unsure (1)..(440): unsure at all n locations
  Clone ID: uC-osroM202038h11a1
acgactcaaacaaagctgttctgtagattctgtaaagagaggatatggttctacagattttaccattaccaaagtgaagagagtccacagaagaatcgagttacgcaaaccttgggaaaactatacaaaaattaccccccggtatcacacttttatagcctctttttattttatttggcagagttgcatcaggggcaaggccatcaccgcaccaaaaacagaaaacataaccagcatcatccagaagggcactcgcttcttctgcttctgctcgcctgcggccttcgccgnaggtttcgccttattggctactactgcagcctgttgttggaccgcaggagatggagctggggcagggttctcttgggtttctggttccgcttcggtttgctccatctggttctgttggttgtatttctcgacgtactctggaaacattt

SEQ ID NO: 41609 - DNA, 332 bp, Oryza sativa
  Clone ID: uC-osroM202038h11b1
tcgcatataaaaaaaaatccccacccgatttctgtctgttttttttcctcctcttccgcgagctcttcccccctctcttctctctttttctcccctctccccggggaaacgcggcggccgccgatcccgatcccccccaccgccgccgccgcccgatccgaccaaatccccactacgcgtcccaattccgggccaattcgaccccccgagcgaccgccatctactcacctcccgatcgattcggatccccaatctagcgggcgcggggcggggcggggaggcgggattgggctagggttctggggggactcggtgtattggattaggtgatg

SEQ ID NO: 41610 - DNA, 607 bp, Oryza sativa
  unsure (1)..(607): unsure at all n locations
  Clone ID: uC-osroM202038h12a1
acgacaaaagaggtgtagagatacaaaaggaacgcgggaagcaacgaaacaaagaaaacaaaaaaaatctaaaaaaaaaaaaaaaagaaaaacaaaaaaaactcaaaaaaaaaaagaaaaaaaacccaaaaaaaaaaaacaaaaacaaaaaacaatggacaaaacaaatacaaaaaaaaaacccacacaaaaaacacaaaacataaaaagacacaactaaaaaaaacaaaacgaaaacaaaatacaaaaaaaaaaaaacaaaaaccaacaaaccgcaacccaaaaaaaaaaaaaaaccaccaccaatggaaaaccaacaaaaacaaggccacccctaacccagtaaaaactcaaatacgaaatacagtcaaaacaaagaaaaaaaaaaatcccagtccaaaaaaaacgaacaaactaaaaatacaaccaaagaaaaaagagaaccccggaataaaaaaaggccaaaaaggaagtaaggaggccccccaaaaaaaacataaaagaccccgttgaaaaaacaaaccagaaatgaccctacacaaaaaccaatggaaaaaaaaacagagcccctttngaccaaaccctcctcccccccaacccccctccc

SEQ ID NO: 41611 - DNA, 508 bp, Oryza sativa
  Clone ID: uC-osroM202038h12b1
ctagatcgcgagctgccgtcctttttttttttttttttttttagccacagaaagaaacaattcattccatgatattcattagaagttctggcttacatcaacttctgtagaatacaaccaccatctcatactaaataaagagagatgtgaaggaaggacagggaaaaaaacaaccagagacccatcatgataaccctaaacaaagagcaacagcaattcagaactcttaatctttcacctaaagttagttttgaccggagactatcaccaaccaaaagcacactggactgctaaaatcagaataaaatcactctcaattgccagagaagaaacccttcttcctcgctgggctccgataaattagtatcgctataagagaaagaacagcaccaccaccatgatcccttaccatgtggttgggtgcaggatgagaaacacccctcctggttttttcaccaggcaccgacataaaaaaacgccagatgttactaacaactacctactacca

SEQ ID NO: 41612 - DNA, 421 bp, Oryza sativa
  Clone ID: uC-osroM202039a01a1
ggggcaattgaaaataacgaaagtgtaacaatattattagcggtttgcaaagccgctcacgccatttacaatacaattgaaatgaatgtatgccatttatatcagttgcagggaaagttcacaaaatctcacaaacaagtttaattgtttcaaccaaaaaaaaagaaagaaagagaaaccccacaaatccacaactgtaaaaggagagacactacaaaagtatacaaaactagattaagtaatcacaccaatagagtaataaagcatacattttttttcagtcactcacgttgagacggcatgtttatgacatcacgcttgggcgatcgctttttgggcggtctcgtcgacgaccttgtccttggacatcttctccagcgacaagcccttggacttcggcaccagcagcgtcatgagcata

SEQ ID NO: 41613 - DNA, 178 bp, Oryza sativa
  Clone ID: uC-osroM202039a02a1
gaggggaaattaaactactgcatttacaacaaaaactttaggggcaagaacaagatcgaggatatacaaccaaaacatcaaaattgattcaatccaacaacagaaatggcactcaaagtgtacaaaaatctacaaaacaggggtaaagaaattacaacccagaataaaaacaaagaaa

SEQ ID NO: 41614 - DNA, 390 bp, Oryza sativa
  Clone ID: uC-osroM202039a04a1
ggacgagaatgggacacacataacaatttctgcatttgaatgtaatatggacagggtaatggagtatgcataatttttacaacagatgggggggcacacaaaaaagccccagtcagggtcatgataacatggagaatagctacctgagcctgatcattgtttcaacgaattggaacacaatgggggactaatattttaaccccaactaatgaagatttcctttttggagtttcgacaacagtgcagctgcataaagttccactggtgggagattcaagaaaatcatttagggttttcatcagcattttcattgggcaaactcccgttagaggcctcttctggatcttctttgacaaaactcccgggagcacttttgtacccatttttttt

SEQ ID NO: 41615 - DNA, 491 bp, Oryza sativa
  Clone ID: uC-osroM202039a04b1
gttttctttaacttgtgcacgtcttcctcctcggggtgatggactagttccttgggcgggcggagttttgtctggccatgcacatatacacatcacgcggatcgaagatgggatgaacgtacgtggagcggtggaggtgcaaccggcaggcacggtggcatctcgatcgatctatcgatcgatgaggaggccacggtggcgtctcgatcgattcgcgacatgtgcgccgagatctatcgatgaagagggcggatcccgaccgtgatgcgcgtgcgggcgtgcggcgtcctctgcggggccgatatgctttgtgggtcgggttatcaagtttggttgcatatctcggagctgatccctatcaacggaatggatttttgtgtacaacgacgagggggaagagaatcagatatccagttccggtggggttcatggccgcgagagccggatccgggcttcccattccacaagaggcctaactaggggggtcaata

SEQ ID NO: 41616 - DNA, 471 bp, Oryza sativa
  Clone ID: uC-osroM202039a05a1
tttctttgcggggtcttggcaaatatgaccgtatcttcattttcaaacaggaaaaggaatctttgagcttaaggaaaatatcttagatacaaaattctcatctttaagatataacccactccgttcattttcaaacaggaccaggaatctttgagcttaaggaaaatatcttacgtacaaaattcttatctttaccaggaacagacaggtaaagtaggttctaccaaaaattcatagatcatcgcaaacgtagagcaagttgcaactatctcaaaaaagtcgcagcatgttcacccatacacacagcatccagaaagaggcaaagggggcggagcaatgttgaatcagggccagcaaatcatacaaggaatccccattcggaagagaaatgaagaatgaaaaactgccattgccaccatgcaagaagcccctaacttgaacctggccattcagcaaaggcccccccgagct

SEQ ID NO: 41617 - DNA, 469 bp, Oryza sativa
  Clone ID: uC-osroM202039a05b1
cttccttttgctcaagaaatccaccagctgctgggtcgggtggttttactagctcgtctggttcaacttcgttgcgcttcgtctactcaggtgcccggaggagcaagaattgttgggggggcagcgaggtatacgcagatggagagccctcttgcatggatgcagtccactggcaccaggggctagggctggtgaagcccatggaggagatgctgatggcagctaacgcggccgccggcgcgaatcctaatccggcggcgacggcgccgtcacccgtgactgggggcgcactgtagggcggcggctgcggcggcgcgcctccggtggcatgtggcgcgggggcgggtagcacggagcggtgggcgcggccgcataaggagaaggcgctcaactgcccgcggtgcaactcgactaacaccaagttctgctactacaacaactacaggctacagcagacgcgctacttctg

SEQ ID NO: 41618 - DNA, 111 bp, Oryza sativa
  unsure (1)..(111): unsure at all n locations
  Clone ID: uC-osroM202039a06a1
ccgtttattccggacggggatctgtaggtttgcggggatcaaaacacctgagacggagtaaaagtggaagaaagaaggatcaaggccaatgccaaccgnaaaatgaaaacc

SEQ ID NO: 41619 - DNA, 410 bp, Oryza sativa
  Clone ID: uC-osroM202039a07a1
ttttggtgtttttttttttttttgtgtttgaagcgcggcaataaaacattgcattgaattctgaacgataaacaccaggaaccggcgtttatttgaggcaagcactgcccaaaatctcgcaaaagtactgaaaccttagacatagtacacatccatggcaaacatggatgccaaatgacaactacagaaaattatcaaattcgaatgcagctgacggcttctcctgctgaagatgcatattttcccctccattacttggatgggctctctccatcgacagccaatgggacggcgctggccaggctgcggtatttcagagcatagaacatttcaatgtaacggcgagtctcgcgcctttcaaggttgcttacgtacttccagaatccgtatacaccagtcaagggcatcag

SEQ ID NO: 41620 - DNA, 168 bp, Oryza sativa
  Clone ID: uC-osroM202039a08a1
attaagaggggttttttaaaaattttggactaaaaaagaacaaaaacaaaataaaaatccaggaccaaaacaaaaaactcaaaaaacacagacaaaaattacaaaccaacaagaacaagaataatgggaaaagaaaagaactagacaaaaaatcaaataaattaaaaa

SEQ ID NO: 41621 - DNA, 262 bp, Oryza sativa
  Clone ID: uC-osroM202039a09a1
tttttgtggtttttctaaccagcctttttttatacacaatttggagcacaggcaatgtcatgaatgattttacaatcttattaactccacttaatcttcacagcaaaaggcgacgacggcgctacagtcaggacagcagaacagtagcacttagagaggttttgacacttggaaactttcctaataaaattggagagaagaaaccttaggaagtttgaccctgttcccccatcaggtctactgttgcatagtgtctgggtaa

SEQ ID NO: 41622 - DNA, 523 bp, Oryza sativa
  Clone ID: uC-osroM202039a09b1
ctccggccttctcttcattttcgttccatccactttcttcttctgggggggtttactaaggaactgggtgtgtttccgccgtcgccggggttgccgtgccaagattgtgtgactgcatattttccttggtcaactttgtttcataaccggatagatgggttctgaaggaccttctggtgttaccgttcacgttactggattcaagaagttccatggagtcgctgagaatccgacggagaagattgtgcgcaatcttgagtcatttatggaaaagagagggttgcctaaaggtttaacacttggaagttgcactgttcttgagactgctgggcagggtgggcttggtccgttgtatgaagtgtttgaatcagccatcgtagacaaagagtatgggttgaatgatcaggggcaagtgattctgctccattttggagtcaacagtgggacaacaaggtttgcccttgagaatcaagctattaatgaagctacctttcgttgtcctgatgagctgggatggaaacca

SEQ ID NO: 41623 - DNA, 480 bp, Oryza sativa
  Clone ID: uC-osroM202039a10a1
ttttgttggagttttcaaaatcgttggtccaatacgctaataaaacgccattagaaatctccctgcagcagctctgccgcaaaatcacaccttgccccgtcaagtatctgaacgcatggttaatagtgccacaattttccaaaggtaatcagacctatccatgtgaagcatagggcatgtacaatcctgatagcaggtaattacaccttaatgatgttaaaagtaaaccttggcacaagtttccctctgatccgtagcttcatacatcgctgagatcagcgtcatcacccttggcatcagcagcttgtttacttcctgggcagcaacatgcaaagaaatctcctaatggtctctctgggacagggataagctttcccacaaatgccaacggccagctaaaaaaggcgagacctattgacaccaaccacaactgccaggtgagtctgggtgtcgagtaaacttgccaagggacttaacaat

SEQ ID NO: 41624 - DNA, 175 bp, Oryza sativa
  Clone ID: uC-osroM202039b01a1
gggggaaatgaagataccgcatgtacaacaaaaactttaggggcaattacaagagctaggatatacaaccgaaacttcaaaatggatgcaattcatctattgtattggctgtgaaagtgtacaaatatctataaatgggggtaagagttttaacctgcaattaaacatagataag

SEQ ID NO: 41625 - DNA, 178 bp, Oryza sativa
  Clone ID: uC-osroM202039b01b1
tttatctccctcggggggccccatgtcctgcgcccgaggaggccctttaagaacctgagtaacacacaagttttggcagcgggtgacgatcggcattactgtgtactcgaaagcggggaatgcgatacccccagggattcacagagagagagagagctagagagcctcgaaccccctg

SEQ ID NO: 41626 - DNA, 464 bp, Oryza sativa
  Clone ID: uC-osroM202039b02b1
ttttgttgatattgtacgtcctcgtcaccgcagggttgcttgtgttcgtcgtcagcgccgtcgccggaatcaagactcttggaaaggggaagcttttcgcgtttccgccgctggttacgatggtaggtcacctgcacctcgtcggggagcgtaccgcaccgctcgttggacgccctgcaccgacgctactgcagcgacgggggcctcatgttcctccgcctgggccgtgcgggggcgctggtcgtgtccacggtgggcgccgtcgccgacctgtacaggggccacgacctcgccttcgcctcccggtcgccgtcgtacagtgccgagaggctcttctacggcgggcgcaacatgtccttagcgccgattggcgacgcgtggtgccgcaccaagaagctggccgtggcgcaccttctgttcacttgccgcgcccgcccgtgccggcgaggccgccgcgctcgtcg

SEQ ID NO: 41627 - DNA, 82 bp, Oryza sativa
  unsure (1)..(82): unsure at all n locations
  Clone ID: uC-osroM202039b03a1
agctatgcacgcctcgcatgcaccgcnngtactgtaagctttggatnncctctattattttgtcncnngccctttnnttttt

SEQ ID NO: 41628 - DNA, 499 bp, Oryza sativa
  Clone ID: uC-osroM202039b04a1
agagtagcaaccatggaaagagatgttgcacttatcaacatgtagtacagtaacaaccatcatcaaatgtccctacaactccgtctctctcatgctcgaagaatataataatctcattgattgaaacacgtataggaaaatttaagcggcaattaaggaagtaatagtatagttgtagcagtagaagagtacagcaacacacgttaattaatcacgcgagagcgatggatggatcggccggtaaggtctcggtctcgacctcacacgaggcggcggcagatggtgatgccgtcggcgatggcgagctggcagacgtcgatgcgcgggtcggcggcgagcctggagttgaggtccctgatggcgacggagaacctccggtccaggtccgacagcggcgtgtccggcggcagcgccaccgtgccggcccacagcgtgttgtcgtacacgatgtgcccgccgacgcgcaccagctgcagcagctgctcgtggaacttgacgt

SEQ ID NO: 41629 - DNA, 481 bp, Oryza sativa
  Clone ID: uC-osroM202039b05a1
aagcaagccagccaatgcaaaatggtttacagattaagctttcaacaccgccttatggatcatcgtctccttgtgtatttggtgacagctcttctcaacaagatcgaggagtttctcgaggttcgccgcccaggaattgagtataccattactgtcttgtgctgtgcggaagcatacaacacccattggcctgtcaatcttcgcaatcagcgactttgagtttaccatgtccgaaaggtgtttctctgcctcctgcaagctcaagcaaagaagatctgcgagcctcttcagggtaatccttgaatagtacttcgaaacaaccaagatattctgaacaaaagcaaagaactggaaatcaactgacaaatacaaagcaaggaaccaaaagagaaatacgataaagtcaagtaagcaatacatgttcaatgatcctcatttcagatcctctgcagctttgtcacccaaagctcctccgagaaaa

SEQ ID NO: 41630 - DNA, 482 bp, Oryza sativa
  Clone ID: uC-osroM202039b05b1
gtttctatgtaaatcgatcatggaattcgggttcggcggcggcgaggtcatcacgcagggcgggtcgtcgtcgccggcgggatggattccggtgagctcgtcgtcgtcgtctagaatcggagcatctgtcgcctgtctcttggctgagctctagtggtgtcctgcctgttgctgctgcttcttcttcttccttctcctaggtgttcttcacttcttctccgttgctgagttctgccaagaaaccaaccaattttgacagcatgtgccatggaagtagctaatcttcagtgacacgaagaatggatccccagatttttgtcagactttcagttggacagcttggtctgaaactccccggtgcgaatgcgaggaaggcggcccggagcttccactgcgagatccgctcccaggattccctgctccgatagctcctgaccctctgatcaatattcagagctcaaccttgaccacaccccatgccg

SEQ ID NO: 41631 - DNA, 390 bp, Oryza sativa
  Clone ID: uC-osroM202039b06a1
gaggcgcagattcagggttggattttagtgaactctacaaaattcatacaacaaagtttgaacgaacggaaaagggagtgtccaattctttcaaagtgaatttacagaaggattttgatggccgccatgggtgctcgatccatcggtgcttcgccagctgtgcgaggaagaagacgacgacgaagactagtaggacatggatgcatcggctacgtgtcgagctcgaggggatcaggggacgatgaggcagaggccgtcttcttggtcgccgtcgtcttcctccggaacggccggcacgccttgacgctgaggtcgacggcggcggcgagcgccacgaacatggcggcgtcctccatgcacgtgacgtggcgcatggcgagctgcacgagc

SEQ ID NO: 41632 - DNA, 404 bp, Oryza sativa
  Clone ID: uC-osroM202039b07a1
gatgcccaaagatatatatgaatatatatcgagtaaaataaaaactcttgttggaattcttgtatacaactattttataaaacccaaagagaggggcaaaaattaatagagtaaatatcagctgttcttcatcaatctagagctccctttgggtatacatgcttctttgttgatgaacaatattatttgcgaacagcttaaatatgtactaaaaaaccattttatttgaatcaaattaagcaaacgaaggggaaaaattaattgaaagaaagaacttttttttttttggttagctaggttgctatgagcctttgatgatcatgccaccatttgctcctggtccggccactgggcgaatatttcgccggcggcgtggcccgccttgacaagagagttcacccatg

SEQ ID NO: 41633 - DNA, 245 bp, Oryza sativa
  Clone ID: uC-osroM202039b07b1
atccatccatcgatttagtaattctcttctccctcttcttgttctggttctcctctttgaatttaacaagaaatcaagaactaggtgtttgttttgactaacaagaactcggtcgaacactctgcgtgcgtgtttgtttgtgtgtgtcatgtgctctgggccgcgcaagccgttcacaccgccgttgccgtagcagcataaggaggcgacggtgatggccgcgtccttgcttcttgagctggcgg

SEQ ID NO: 41634 - DNA, 422 bp, Oryza sativa
  Clone ID: uC-osroM202039b08a1
ctactcttctcaaccaaagagcactacaacactcaaacaagacaatattcttatttacattcagacaatgcataaacttgagaagatgctacacaatctaactggagcatctatcgatcaccaaaaaaaaaagttaaaaccaccgatgacatacttacagtacataattgtaaccggcaaaatgatcatcaactaccttttcatgcttttggttagacatgatatgctttatattttctccatattcggtaaacctttctgaacttgtgcaaacctcaatcagcttaaagttgtgattgagactacatggcgcgacattgcacaaccaacatgtacaaatttgtaacgttcatctgagttagcgaagtttaaacatcatatacgggcatgcgttcttcaatgggcacacggcagattggaca

SEQ ID NO: 41635 - DNA, 280 bp, Oryza sativa
  Clone ID: uC-osroM202039b08b1
tttgataaagtaagccgactgttgatttgaagattgtattccttcctcttctggcctttgaagtgattattcttgctgacaatttcagaatgtgtagagctttaatgccaggagatgaagaaagtatgagcgatgaagctatttgggagacacttcctcacttttgggttgcaatttctatggtgtttcttatagctgctacaaccttcacacttttgaagctgtttggtgatgttggtgctttgggatggtgggtatttgtctgtattttgccgattta

SEQ ID NO: 41636 - DNA, 394 bp, Oryza sativa
  Clone ID: uC-osroM202039b09a1
aagtatccaaaatcttttctccaatacgctaataaaacgccattagaaatctccctgcagcagctctgccgcaaaatcacaccttgccccgtcaagtatctgaacgcatggttaatagtgccacaattttccaaaggtaatcagacctatccatgtgaagcatagtgtatgtacaatcctgatagcagttaattacaccttaatgatgttaaaagtaaaccttggcacaagtttccctctgatccgtagcttcatacatcgctgtgatcagcgtcatcacccttggcatcagcagcttggttacttcctgggcagcaacatgcaaaggaaatttccaatggtctctctgggacagggattagctttcccacaaatgcccaccgccaggtaaaaa

SEQ ID NO: 41637 - DNA, 366 bp, Oryza sativa
  Clone ID: uC-osroM202039b11a1
tttttgtgtgtttttttttttttggtggttttttttttggttttctttttttttttttaatcccgtatggcacctgttattaacgtagcaagctttacaattcccgtcaaaagaaccaaatatgctggtgtacaggagtgaaaacaaaatcccgcccgagaacaatttacaatgtccgactctttaaaagaaaataaaaagaggcgggggcttaaaagaaactgagaagataagtacagcttatttcaacataaaaatcgacatttgtttagatacctggtacaacacaatcccccggggggaaatcttttctttctttcttgggtcaattgttggagcacaacatgcaaaacctggcctgagatt

SEQ ID NO: 41638 - DNA, 385 bp, Oryza sativa
  Clone ID: uC-osroM202039b12a1
gggggggaaacaaaccttttccgggggaaataacccaaaaaccgggaaaaacaaatattccctccaaaaaaaaccaaaaacccccctgaccttgacccaaaaaaaatggggctaaattccccccacaaatttttttttttaaaccaaaaaggtgggccccaaaaaaccgggacgcccctttttaaaacccccaataggttggccggtttcatttcatttgaaataacccacttaaaccccccccatttttttaaacttaaaagccgggggaccaattttaaattggggggggggttggccttcgggcggaaatgccaaacccttttaatgtggaaccccttcctcgatgacttgcaagaaaattcccccccccccggttttgggg

SEQ ID NO: 41639 - DNA, 196 bp, Oryza sativa
  Clone ID: uC-osroM202039c01a1
gaaaacctctcataaccctcgtagcatttgattggagaaacagatgttcacaagtagatacagagctaccgaaactggaagaacagaaacccgagggaatggacacaaggaacataactgaagggcaaagtgtttacattattattgattgagccccagcttgcaacaaagtactaaaaagtttctactgaggatt

SEQ ID NO: 41640 - DNA, 333 bp, Oryza sativa
  unsure (1)..(333): unsure at all n locations
  Clone ID: uC-osroM202039c02a1
tttagtggccgccgccggagcagggaggaaggagaagggtatcggcggcggtggggggctgcggttccggggcgggagcgggacgttcaaggtggtgcaggtggcggacatgcactacgcggacgggcggcggacggggtgcctcgacgtgctcccctccgaggccgacggctgctccgacctcaacaccaccgncttcctctaccgcctcttccgcgacgaggaaccccgaccccgtcgtcttcaccggggataaatatctatgggctttggatgcaaaccgatgcgggccaagtcctatggaaggcaggcaatcggccccaggccattaac

SEQ ID NO: 41641 - DNA, 502 bp, Oryza sativa
  Clone ID: uC-osroM202039c03b1
gtttgtttcagacctatatgtgctgaaaccctggaaatatattggaattgaggtttggcaggtaaaggctggttcggtttttgacaacatcctcatttgtgacgatccggaatatgcaagaaaagctgctgaggaaacatggggtgcaaacagggaggccgaaaaagaggcttttgaagaagctgagaaggagaggaaagctagagaggataaggaagctgaacgagcaagggaggaaggagagcgacggatgagagagaggggtgatcggcaccgtggcagggattacaaggacagatacaaaagacgtcatagggatcactgggatgatgactaccatgatgagctttgaaatcacggaaaagtgcattcttcctaggagaagctggaatttgcatggtcattgcttataattgttaccaataaatgatctgggaggccagaatagccgcaagtgttccttgctgcgtgtgctgaaaatttgaatatccggattggaatg

SEQ ID NO: 41642 - DNA, 519 bp, Oryza sativa
  Clone ID: uC-osroM202039c04a1
gcataattcaattcaattttaatttactaaaataaacaattggcatcttccttccttctgtccaaatggcaaggcaacgcctttgtaacttagcttacacatgctgcagcttccaccaagtaagctcagcgatgatggaaatcccctccaaataaataaataatcttggatcaaccacaggagtagatttgacttctctggtagcactgcacaagaattgacatagcttctggtttgccctaatacacacagatgaagctgccctaccactgtggaacaaaagaaatgccggagatctgtatttctatctacaggaaagaatttaaaaacttgggcttgattcgccgcctgcaaaataatttcttcaagctcgtatcgccgcatatatggagtgtaggctgcttagttacaatccagaccacattcctccagaagagggccattattcttcgcaaggaaaggatcgatcccgacccatagaagtgagaagattgaagccagtagaatggaccagacgat

SEQ ID NO: 41643 - DNA, 384 bp, Oryza sativa
  Clone ID: uC-osroM202039c05a1
acccaattaccaatccggactcatacttacatatggttttggtttgcacataataatgaataatccaaagctctggtctcaactaatgttcatcaacacaaataccaatgtaccagcaaccccaataccactactttgtaaacaaaaccatatttattactcactacataattctctaatttcacatccaaacatccaggcacgcttaaatcagcagtagataaccagtggaagaacaagtctcttttaggccttcctgcaaacgcctccctcgcatgctgggtcagcctcagcctcagcctcgtcatcgcccttcttttgctgcttctttcccagcgcgcacttggggtgcaggtcgaagtcacactccctgcacctgtacga

SEQ ID NO: 41644 - DNA, 468 bp, Oryza sativa
  Clone ID: uC-osroM202039c06a1
agagtagcaaccatggaaagagatgttgcacttatcaacatgtagtacagtaacaaccatcatcaaatgtccctacaactccgtctctctcatgctcgaagaatataataatctcattgattgaaacacgtataggaaaatttaagcggcaattaaggaagtaatagtatagttgtagcagtagaagagtacagcaacacacgttaattaatcacgcgagagcgatggatggatcggccggtaaggtctcggtctcgacctcacacgaggcggcggcagatggtgatgccgtcggcgatggcgagctggcagacgtcgatgcgcgggtcggcggcgagcctggagttgaggtccctgatggcgacggagaacctccggtccaggtccgacagcggcgtgtccggcggcagcgccaccgtgccggcccacagcgtgttgtcgtacacgatgtgcccgccgacgcgcacc

SEQ ID NO: 41645 - DNA, 398 bp, Oryza sativa
  Clone ID: uC-osroM202039c07a1
gagaacctaagtgatcataaattatacgaccaatggaacatattgtacaaatgaataacaatgagatgtttatgaatcatataaagctacaactgaggaagctacactggttggaatcttatgaatctcccttttttctttctcctatcctacacttgaattgtttccagaagacgacctcaacagttgatgatgattaggggttacagaattgggcatgcctgggttgaacatgatgtttgacgtctgtggggatggctgggtttggatggcccgacagcggcagacgaggtccaaatgacagcatctgctgccggtgctgctgttgtaagaatgccatctgggggggaccatgcccctgcatgttattggcaaatggtgctggcatactggattga

SEQ ID NO: 41646 - DNA, 319 bp, Oryza sativa
  Clone ID: uC-osroM202039c07b1
ttctataaagggcaacataaagatcctaagaggcctatacaataacatgttagagtgcagctgggatagggataaaagttactaccaagagatttgggatgtacatctggacaagagcatttaggtggatgtttactgcagccacctccctgctgctggtcaatgggtgcctagaatgtacggattggagaaggatgctctcctgggctccatgcttatactaaccagttacttggttgtcgggaggtttattgctgcttggattggagcctttgtatccaaagactaggagagcaaaagtggtgcgaaggggacaata

SEQ ID NO: 41647 - DNA, 516 bp, Oryza sativa
  unsure (1)..(516): unsure at all n locations
  Clone ID: uC-osroM202039c08a1
gaattgaaacatagatatcgaagcaatcgaatgaactactacataagtcagcaggtccatcgtcagaatatacaacaaacaaattaagatggtcgaatctggaactggaaggacgtcggagcgcagggcaggggaaactgactgtttcctgcgctgtattgttctctgacgaagctatttgttttgtatgcatagaaaggcaacaacatggcagctgtacaacatgtacgaatctcttcaaaataacaagatccatattcacgacaccatgagggagcgagccgcacagcctaaatgacgaagctggataggtgagtggtttggataaaacaatcgttgtcatttcggtgttctagtctgtagagaatgctccttcacagtacctgttgctaaacttctcgatggcagtagatgcataaagaagtgtttcaccagccttctcttacgccatataaagttctcttnctcgggtaactttagcaatgacccatgcattattttttgctctgatgcata

SEQ ID NO: 41648 - DNA, 468 bp, Oryza sativa
  Clone ID: uC-osroM202039c09a1
gcacacggaaaagaccaaggtatatatatcaccgacagcaacaagtgagtggtccacatgacaaaatgtatatagagcagagtaccactggacaccatttcccaactacacaaacccaggcacataaagcagcttccaaacataagacaatggaagataataatatcgtctaaaagaatcccaccgggtaaatcctgaaatccctggagcacactctgcacaccccctgtaccgcttcatctgtatgactcggtgcgcttcggcttgctttggaccaccgcttcgatcttgtcgacgacttctggggttagcagcggaatgacatcgagggccttcatgttttcaacaatctggttttcttttgtggctccagtgatcacagatgagacgtttgggttcgatgcgcaccacgcgatagcaagttgggctaacgaaacaccaaacttagaagcaattgttttagcccat

SEQ ID NO: 41649 - DNA, 452 bp, Oryza sativa
  Clone ID: uC-osroM202039c09b1
gcagatccaaaccttttttatcgtcgacgaggaagaaggcggcgggggcggttgaggcgaaggcggcgaagatgcagtacaagaacctggggaggtcggggctgcgggtgagccagctgtcgtacggggcgtgggtgacgttcggcaaccagctggacgtgaaggaggcgaaggcgctgctccaggcgtgccgcgacgccggcgtgaacttcttcgacaacgccgaggtgtacgcgaacgggcgcgccgaggagatcatggggcaggcgatgcgggacctcgggtggcgccgctccgacgtcgtcgtttccaccaagctcttctggggagggcagggtcctaacgacaagggtctttcccggaagcacattgttgagggccttcgcggttcgcttaagcgccttgacatggactacgttcgacgtaggttactgccaccgtcccgactccac

SEQ ID NO: 41650 - DNA, 423 bp, Oryza sativa
  Clone ID: uC-osroM202039c10a1
atagtgcattcgttacacgttcttgggcatgcgtcccacacaaaaaggcacactggatcacaggtcacgaagggaggggacagtacccccccccctacccccaacatgcaagatacatgtttgttacagcggcacggtgctgtgtcgctcgactcactctggtgctgctgacatgactgcaagcagcaagatggcgtcacttagcggcacaaacagacaagcatccacagctgctgctgccgttgctgcaccaagagcgtctttgttggcaggtgaccgcgtcgcgtgcacaacattgataacgacggaatgcgtaccatttgagtgttggataatactggcagggtaccctggccagtcacattacatgccacttaactactgccgctatgtaagttgagcccctgtgcagaaagacaacag

SEQ ID NO: 41651 - DNA, 311 bp, Oryza sativa
  Clone ID: uC-osroM202039c11a1
ggacgacaactttaaatattgctcaataaaacactatctggagacaacacacacgagagtcatatccagaggaaaacaatcagcccagacggaccactagcaccaaatgcaaagcaatgggaagaactaattcgaccgctaccaccctagtaaaaaccagagaagagagaggaaggggggacaggaagaaaaacattctagtagaacaggagaagaatccatccatcatggtgacagcagcatgaggcatctaaatcgatggtctccaataacatgcggagccatcgatcgatcgatcttcccattttact

SEQ ID NO: 41652 - DNA, 419 bp, Oryza sativa
  Clone ID: uC-osroM202039c12a1
ggacgacaacccaaaaggttgctaactaaaacactatatggagacaacacacacaagagtcatatacagaggaaaacaatcagaccagacggaccactagcaccaaatgcaaagcagtgggaagaactaattggaccggtaccaccctagtaaaaaccagagaagagagaggaagggggagacaggaagaaaaacattctatgggaacaggagaagaatccatgcatcatggtgacagcagcatgaggcatttaaatcgatgggattcaataacatgcggagccatggatcgatcgatcttcctattttactgcccatcgcaagcgtggccattggaggcttttttcacctcatcaccaccctgctgcgtgaggccagaggtacagagggtcaagctgtcccttaggagctgcatgatc

SEQ ID NO: 41653 - DNA, 328 bp, Oryza sativa
  Clone ID: uC-osroM202039c12b1
tctatttgcttttgcatccacaagaccactcgaacgggctctctatatccgccgacgggtctcgactaatcacttaggtggtcacaacgccccccgaggagattgtgtacatggtcaagttcgccaaccacgctcaaaggattgaggtgatccgtgagtacgtgctgcacggtggcaacactgtaggtgcccacaagctcactgtcatggaccgcacccttttggctgttgcctacatgaatgagattagggcccggcaggcctcctggctcatgagactaattctacagacacacagggtggccggcaacctggcctgaagaacatg

SEQ ID NO: 41654 - DNA, 407 bp, Oryza sativa
  Clone ID: uC-osroM202039d01a1
ggatgcataaatattcatctttttattatgtaaattatgctgcttttacaaaattttctttcagaaaagaagaaaaataaactacccacaaagtagtaacatttacaactactggagctaacagagaattcatcattgaaaaatagaccccaaattgcagggtttagttcgattgtccactcgtggactacaacatgagtctccgtttgtcgacaaaccccctcaactattggccttcaatttctccccgaggattttgttcaacaaaacaggattagctttaccctttgatgctttcatcacctggccagcaaaaaaatccttgcaatttagttttcccggaccgatactgctcaagttgctttggattatcagctaatacttgatctaccattgccttaattgct

SEQ ID NO: 41655 - DNA, 150 bp, Oryza sativa
  Clone ID: uC-osroM202039d02a1
gttaataaattatagagcttttagctctaaattttcaattaaaaaaaaggaagactttttcacagataaacaaaacacaagtgacacttgcaaggcaaagcgaagagctcatatatgagaaaaaccaccctaacacaaaacaaaaaatac

SEQ ID NO: 41656 - DNA, 87 bp, Oryza sativa
  Clone ID: uC-osroM202039d02b1
aattattaaggaccttttggcacacagggcaaggtacaacttacacgtcttttaaaagacacactacacggccctaaaaggcaatgc

SEQ ID NO: 41657 - DNA, 359 bp, Oryza sativa
  Clone ID: uC-osroM202039d03a1
aaaataaaaacgagtgtcttatccttttggtataacatgtagccgccatgctgtttacacgacccaaattacagccatttacctccggattgaccttaagaaaacaaaccttccgcagcagagacggaactgttatccagaacctccatggtgcctcaacttttaccgaagaaatttattatgatacctttggcaatttagtccaaacaaggtttggccaccccaagacttcaaaagctgcaaacagctttaatcccagcattacccggaaagttcggtcccaacaattaacccatgaaaaatttgatgaggcacccaacaattacccaacatttagacaagtcatttcctgaaggccc

SEQ ID NO: 41658 - DNA, 305 bp, Oryza sativa
  Clone ID: uC-osroM202039d04a1
ggggaaagggtcatcatcaatcaccaaaagggaaacaaattattcccaaaagaagaagggttttcacgttttgatcaacgcgacccccatttcaaaaagatccctgtcatggaccatgctatcatttggaaagctccttccacaacaaacctgggaagaatcaccccgtattaacaaaatgcaaaagaacttggtttcaccaaaaaaccccattgaagggcggctctgtcataaaacctaaaggcaatagccccgggggttttttcttatgtgcaaagcgggaaaagaagcttttaagacccctt

SEQ ID NO: 41659 - DNA, 449 bp, Oryza sativa
  Clone ID: uC-osroM202039d04b1
atccatttgagggtgtcattaaaaccataccgggggtatttaaatattataaaaaatcctatggatcttggaactattaaacaaaatctggaatctggaagttatactactgtaaatcaatggattgcggatgttaggcttgtatggagtaatgccatgttatataatcctcctggaaatgaatttaacacaatggcaaaaactttatccgatacatttgagaaaaaacttgctcagatggttcataaactaagttattcctcttcacagaaaagagatcagctacgtagtactctagagacgttagtagcacaatataagaattatgagtcaaaattgggaatgctcacaaaacaggcagaggatgaagctagagagcatcctgatttgcctccccccatcaaaccaagttctgcactacttaaggcacctttgaattttaatgagaa

SEQ ID NO: 41660 - DNA, 111 bp, Oryza sativa
  Clone ID: uC-osroM202039d05a1
ggggaagggaaaaaacaatccccttccaagcacccgggggaacaagcccacaccaacacacaggaaaaacgacgaggacacaaacaagcaaaataaagcaagcaaagggca

SEQ ID NO: 41661 - DNA, 316 bp, Oryza sativa
  Clone ID: uC-osroM202039d05b1
gccttagctgatcaaaccgaggaaggcttgagcgtaatgacagccggcgaggggaaggcacggaggtgcaggaacagctacagcggcagctacagcagcaacatgagcaatgatgaagagctgacctgctggacaagagtgagctggacacagagccacctgccagctgagcgcggagggcatgcaacaaggtgcacctaatcaggggcaggcaccaagggcggttagacgcaatcatgggtggatgaggcgcaactgctggggatgctgctgaagaagggcgaagagagacaggacagaataagcggtgtgtgtg

SEQ ID NO: 41662 - DNA, 393 bp, Oryza sativa
  Clone ID: uC-osroM202039d06a1
agggtatcaaccatggaaagagatgttgcacttatcaacatgtagtacagtaacaaccattattaaatgtccctacaacttcgactctctcatgctcgaagaatataataatctcattgattgaaacacgtataggaaaatttaagcggcaattaaggaagcaatagtatagttgtagcagtagaagagtacagcaacacacgttaattaattacgcgagagcgatggatggatcggacggcaaggtctcggtcttgacctcacacaaggcggcagaagatggtgatgccggcggggatgtgaagctggcagacgtcgatgcgcgggtcggaagccagcctggagttgagggccctgatggcgacggataacctccggtccagagttcgacag

SEQ ID NO: 41663 - DNA, 426 bp, Oryza sativa
  Clone ID: uC-osroM202039d07a1
atgcaactccttttttccatatcatttatagaaagatcagcaatacaaacacaaccatccggacaagaggatggtaacatctggaagagaagtagagagctcttagctctaaattatcactccagttagaggaagacatagccacagctaatacattacacaagtgacactgcaaggcagagtgttgtgctcatatatgagcaactatggagcatacaaggcctaatggaggaaatccctcataggatcatcatggtgaattctcttcatgcggtaagcctccatgtcttccgcggtgacctcatcattccatttcacattgtacttcctcttcctttcatccatctcctctttcctcctcgcaccctccttttttagggcttcatcaagcagcttcttgtcaagaacaatatcattaggcacatc

SEQ ID NO: 41664 - DNA, 240 bp, Oryza sativa
  Clone ID: uC-osroM202039d08a1
aacagagagtaaaactcgcaaaatgcaccaatgctgtacgcgttcatatggatatgagaattgtaaacacggtgaagagaaacctaaacattccagagcacataaattaaggttcgctaattcaaaaattggattttttaagacataagttgaggttgagggataagacagccagttcttgcctgccataatgccaaaatttcctttctcagattcttttgcttgcaaaattttctaagc

SEQ ID NO: 41665 - DNA, 393 bp, Oryza sativa
  Clone ID: uC-osroM202039d08b1
tcccaccctgttttcctcctaatctccacgccccggcgatccgagcacaagtatgcatggccgagcgcggaggcggcggcgagaggggcggcgagcgcggcgggttcgggcgcgggttcggccgcggcgggcgcggcgaccgtggcaggggcgggcgcggcgggcggcgcggcccccgccaggaggaggagaagtgggtgcccgtgaccaagctggggcgccttgtgaaggagaacaagatccacatgatcgaggagatctacctccactccctccccgtcaaggagcaccagatcgtggagcagctcgtgccgggcctcaaggacgaggggatgaagatcacgccggtgcagaagcagacgcgcgccgggcagcgcacgcggttcagggcgt

SEQ ID NO: 41666 - DNA, 412 bp, Oryza sativa
  unsure (1)..(412): unsure at all n locations
  Clone ID: uC-osroM202039d09a1
gaatcaacactcctagaaccatatatgtcccttggcgacaatcaatcttggaagatccatggtcaccagcttagcttgttgcatactcgatgacagaaaccaaacaattagtgagttgaaaagaaaaaaaaaatcaaagaatagactctgttcaatagagtcgatcaatgggcagatctcttgtttttacaagatggcgtatgatgaattagttggacatcctgagcttcttgaccggcagtggactctgcacctcctcctcctccgcccacctcttgatcccggcnnnntttgtgctctccggcagcggcatcaggttgaggtcgaagttcctgacggccgacgaggcggccgacgcggacgccgagacggagacggacacccacgtgccgtcccaatagtggcagcgctt

SEQ ID NO: 41667 - DNA, 465 bp, Oryza sativa
  Clone ID: uC-osroM202039d09b1
ttctgttgcgctgctcgacccgacggcgctgggcttgggcctgcccacgccggcgatcaacaaggaggagtacctcgccatctgcctcgccgcgctcgcctgcacgcgggcggggaaggccctggtgggagtgggaggccagcagcaggtgcaggcctgcaataagtggctgtgcccagcgcccgcggcgcctgaggagctccgcttccggtgcaccgtctgcgggaaggccttcgcctcgtaccaggcgctcggcggacacaagtccagccaccggaagccgccttccccgggagaccactacggcgccgccgccgcggcgcagcagctggcatgcgctggtgactcgaaggaggactcggcgtcgtcagcggccgggagcactgggccgcaccggggcaccatctgcaagaggagctctccgacggggcaggcgctcggtggccacaagcgctgtacctactg

SEQ ID NO: 41668 - DNA, 424 bp, Oryza sativa
  Clone ID: uC-osroM202039d10a1
ctaaggaaagctgaagataagtctttatacttgcagagactttagggtacaacagatgaaacgaaataaagatgccacagatcataaaaaaaaagtacaataatttgtaaatagatcagaaagtcataaaagaaaaaggcacaactgatggagtaggtacaacatatcgataatacaatggcacattgcaattgcggattatgtctagatcatccattattcttttgctagttcgttgtactcatctatcaccacactggggttaggggaattcttagccttttgaatcatgcttgccagttgtttgatatgagatgtctttgccctagtatcttcaggtgcctggctgctgactgttaaaaatacctgttgcagctttgagaggttttccagaccgtacatatagtccaccattctgaacctc

SEQ ID NO: 41669 - DNA, 498 bp, Oryza sativa
  Clone ID: uC-osroM202039d10b1
tcggtataaaatccacatgagattgatcgattgatttggccggtgattaagcgagccagatcgacgatggacctcgtcgtcggcgcgtcgagcgaagccgtgaagtcgctgacagggaagctgggcagcctcctcgcgcaggagtacaccctgatcgccggcgtccgcgacgacatccagtacatcaacgacgagctcgccagcatgcaggccttcctcagcaagctcaagcgacgggacgtcgaccacgacgagcagcgtcaggactggatgaagcaggtgcgggaggtggcctacgacatcaaggactgcgtcgacgatgtcggccaccgcctcggccgcgagccgcgggggagcggcgcggccatcttcttccaagggcgtggtaccttcttaccaccctttacaagcgccgccgcatcgcagccgagatcggcaacctcaagctccgggcgcagcatgtcagcgagcgccgacccagtacggggtggagaacct

SEQ ID NO: 41670 - DNA, 473 bp, Oryza sativa
  unsure (1)..(473): unsure at all n locations
  Clone ID: uC-osroM202039d11a1
ggacgacaactttaaatattgctcaataaaacactatctggagacaacacacacgagagtcatatccagaggaaaacaatcagcccagacggaccactagcaccaaatgcaaagcaatgggaagaactaattcgaccgctaccaccctagtaaaaaccagagaagagagaggaaggggggacaggaagaaaaacattctagtagaacaggagaagaatccatccatcatggtgacagcagcatgaggcatctaaatcgatggtctccaataacatgcggagccatcgatcgatcgatcttcccattttactggccctcgcaggcgtcgcccttggaggcttctttcacctcatcaccaccgtcctccgtgaggtcagaggtccagagggncaagttgtccctcaggagctgcatgatcaaagggctgnccttgnaagactcctccccgagggtatccaactcggagatggctt

SEQ ID NO: 41671 - DNA, 476 bp, Oryza sativa
  Clone ID: uC-osroM202039e01a1
caggtcaagttcaaatccttaatcaaattctgatattctctacaaatctgttatccttggaccaaattattttctctttcccaggccaaagagctcatatttgttatccttggaacaaagcaacacggtggcaatgcgccatctagtctcatccgatataaatatggagaaagcaaaaaaaaaagaaaagaaaagaaaagaaacgaaaagaaggaagtaagccaggagtgaattttattcatcattccctgtgtattacactatacagtagggcttcaagatacatgcccatatttggacagcattctgggattcgcatatcacatctcgggtatttcttgggtttctgtcgctaaccttgggttgctgcttaacatttctgccacgagtttggactgggcaagcccaagatcgaatgaggagaaagagtgaggagcaagcgtgacttgcatttgctcttgtgattggaaagctgc

SEQ ID NO: 41672 - DNA, 442 bp, Oryza sativa
  Clone ID: uC-osroM202039e01b1
gttgatacatttgatagatcatctcgtaatgggcccaaggcttttgtcagtgaatatgctgtttggagaagtgatgcaggtagaggaagtctacttgcttcattggcagaggcagctttccttactggactggagaagaatagtgatgttgttcagatggcaagttatgcaccactcttcgtgaacaacaatgatcaaacgtggaacccagacgccattgtatttaactcctggcaacaatatggaactcctagttactggatgcagactcttttcggtgaatctagcggtgctatgtttcatccaggtacaatcacttccagctactctggttctctggcagcatctgcaattacttgggaggattctgaaaatagcttcttaagagtaaagattttaaactttgggtctgatccagtgagcctcacgaatctctgcaact

SEQ ID NO: 41673 - DNA, 442 bp, Oryza sativa
  Clone ID: uC-osroM202039e02a1
caggtcaagttcaaatccttaatcaaattctgatattctctacaaatctgttatccttggaccaaattattttctctttcccaggccaaagagctcatatttgttatccttggaacaaagcaacacggtggcaatgcgccatctagtctcatccgatataaatatggagaaagcaaaaaaaaaagaaaagaaaagaaaagaaccgaaaagaaggaagtaagccaggagtgaattttattcatcattccctgtgtattacactatacagtagtgcttcaagatacatgcccatatatggacagcattctggtattcgcatatcacatgtcgcgtgtttcttgcgtttctggcgctaaccttgggttgctgcttcacatctctgccacaagtttggactgggcaagcgcaagatcgaatgaggagaaagagtgaggagcaagcg

SEQ ID NO: 41674 - DNA, 143 bp, Oryza sativa
  Clone ID: uC-osroM202039e03a1
gggagggaaaacataggttattctgataaatggggaattacatagagaggggccatttatttagtttaagtgacagcacaaatttgaaaattcataattatgaaaatggggaaattaaagttacacaaattgaaaaatttatt

SEQ ID NO: 41675 - DNA, 441 bp, Oryza sativa
  Clone ID: uC-osroM202039e04a1
gataaataacccccattctctttattaattattattattattgcttctaggagtactaatttacatgcaaagatctgaccgatacatatatatactacaggacccgttccaacattgctgttacattatgaatcctgaacttgcacggaacaccctcctctttttttcttggaacgtattgttgtcccggccaattctgaattcccacctgatgatcacctgcccggccagggatggacatggatggatggatggttgctcgttctgagcgattcaccaggggcgggagagacaggaagtgttgcctacgcggtcaccgatgtctcgatggcgacgcggtcggagtagatgagcacgtcctccgccttctcggcctcctcccacagctccggcagagcctccctgatgttgtggatgctcttcagcgcgtggtccgcgccc

SEQ ID NO: 41676 - DNA, 483 bp, Oryza sativa
  Clone ID: uC-osroM202039e05a1
aagaaacttgatggcaagatttattattttcatcatcaaagacattaccccccaggggcaataatacagacatagtcagcactgggtagccagggggggttcacaaaagaaggaacaattttacatcagggttgataagagttgctttagcttacagatttacaatggggggggtttgcctggcgcttaagggttggcctaactccggaaggttgtggttaaaaacccgctctaaatcactgcatatctcttgctgggagcgatgacctttttgcaataagtctacgttggaatgaaaatggccacatttgccaatgccagaactaccctggaagcaaggaagggtgatgggaaggcattttcaagtgcttttcgttttggtgctgttatgggcttcttgctggcatcaagcggacttgtggttctttacatcggcattaatgtatttaagttggattatggtgaggactgggaaggcttttt

SEQ ID NO: 41677 - DNA, 435 bp, Oryza sativa
  Clone ID: uC-osroM202039e06a1
acagcaatgatggcaggtaatattgccatatcaattttcctgctatggtatgtacaccagagaacgagaacaatttagatgatttgggatggtggagcatctgaaataatgcacagttcttcagacttcacctacggttcaagcactactgcccccaatcgatcatcaaactacaggggcaagagaaaaagataacttgggtatattgcaggagctgagaatatttgctaagttttcttcacctatgatttaagcactaaaacccctatgggtggaactccaggggttggagggaatgctggtgcaagcctgcgcagcaacctttgccatcgcttcagcagagatgccagcattgcagatgtttgcaaaggaacgcatatgcttcattccatactgcgctagcgagccgcattgtgcttcgaaagtgcgtaccat

SEQ ID NO: 41678 - DNA, 418 bp, Oryza sativa
  Clone ID: uC-osroM202039e07a1
ggaaacaaaacaagcgcagtacgcatttacacatgttttgaatttcagaagagaagcaaaaacagaaacacctcgaacaagacagtagcgtttacctcatgaagaagtaacccatggcacaagtcttttctaggagcttattatactttgtccaactatgtaatgcaaaagataatagaatcatcatatgagctaattcactacaatgttcatgaactcgagtcatgacttatagcctaatacagctttgctccagcaaaaaaataagttctttgcttaactacaattgactgaaggggaacaaaattatccccagcaggggtgcacaatcttaattcatggctttttggaatggtgccaataatatcatggagccctatcaaatgggcgggtattattggaggatatactccataca

SEQ ID NO: 41679 - DNA, 345 bp, Oryza sativa
  Clone ID: uC-osroM202039e07b1
gtgagtgttgttgagaagaaataccatataggggcgggagattttagctatgaattcgcgaattaaaacatgcctatgatgattgggtggccacggacatgaatgggaagagctgagctcaccatgctagctccgaggaaataaaatgttgccataatggagctgaccaccctagtggtgactgccatcatagacgagacttggagcccggactcccgaggatgaggctgcaggagccagaatgggactaaccagttgccggtggcggactttatgaacagcatatagcggtgctaggcagcagccagagacaatcacgtgcatgtactgtggatatctggcagc

SEQ ID NO: 41680 - DNA, 476 bp, Oryza sativa
  Clone ID: uC-osroM202039e08a1
actagagaaacctcccaacatgagaagtgataaaccatccatattttgtcaaactgtttacatgctcaatttgctcatgtacgtctgacatgctcgtatttacacgctctaatcctattctgctattcaagcctaagacaaataataacatgcttcaaatccacaatcattttttacccacgagccaactcactgatccggattaatttaccggcatcgcttgatcagcacgtagctcgacgagtacagacaaacgcaagcaaaaccgagtcattcccgctgcacaccatcggccgccgccgccgccgcggcgccgtcagacctcctccggccggctcgcctcttgctgctgccgtcgccgttggcggcgacgtcgtcgggcggcgcgacgtaaacgaaggtgccgacgaggcagtcgtcgtcgagggcgaggagcggctcgagcgccttcacgaccgcggacatgtgggggcggg

SEQ ID NO: 41681 - DNA, 438 bp, Oryza sativa
  Clone ID: uC-osroM202039e09a1
tggggctccttccaaaccacctccgcccccaacgtcggcggccgccacgtcgtccccggcggcgtaacaacgacacaaaaaaatgaagccccgaaaaacgtctctgtaccagccactgcaaccaaatctctgccccaaccccaggacaagcttctcggaggactactctctgccgcattcgaagaatcctcatgtcagagcagatacaaatcatctctctaccggaagaagtctccgttccctctgtccccttacctggttcagaagctgcggaagtacgaggcctaccacaagaagtgcggccctggcacgaagcgctaccggaaggcgatcgagcagctcaaggcggggcgcaacccccacaacgcccagtgcaagtacgtggtggggttcccctgcaacggccctggcaaccgcatgctcaccatcgccttcacc

SEQ ID NO: 41682 - DNA, 545 bp, Oryza sativa
  unsure (1)..(545): unsure at all n locations
  Clone ID: uC-osroM202039e10a1
tggggctccttccaaaccacctccgcccccaacgtcggcggccgccacgtcgtccccggcggcgtaacaacgacacaaaaaaatgaagccccgaaaaacgtctctgtaccagccactgcaaccaaatctctgccccaaccccaggacaagcttctcggaggactactctctgccgcattcgaagaatcctcatgtcagagcagatacaaatcatctctctaccggaagaagtctccgttccctctgtccccttacctggttcagaagctgcggaagtacgaggcctaccacaagaagtgcggccctggcacgaagcgctaccggaaggcgatcgagcagctcaaggcggggcgcaacgccgacaacgccgagtgcaagtacgtggtgtggttcccctgcaacggcctcggcaaccgcatgctcaccatcgccttcaccttcctgtacgcgctcatcttcaaccgcgtnctcctcatgcacgtcgcggcggagcaggagggcctcttctgcgagccgttcccggggagcttgtggtgcttccggcg

SEQ ID NO: 41683 - DNA, 267 bp, Oryza sativa
  Clone ID: uC-osroM202039e10b1
ctggggggagagggaatctgcttgcgtgtgtgtatatatatacccgaattgctttatgaagaacgaacctgaatacagatacataatccattttacataatacattttgcgcattttcaggcgtatacgagtccaaacgaatataaccaatctccaaaaggcctagctaatccacaggacgtgacgtaaccaacgccattcggaacgtgaaaccgaaaaagccacttctccaaaaaattagctatcgaacaccttgagaccgaaccc

SEQ ID NO: 41684 - DNA, 431 bp, Oryza sativa
  Clone ID: uC-osroM202039e11a1
ggcgtcgggggggagcaagaacggcgggtacggggactacctcatcgaggaggaggaggggctcaacgaccacaacgtcgtcgtcaagtgccacgagatccagaccgccatctccgaaggagcaacatcatttctcttcacggagtaccaatatgttggtatcttcatgtcaatcttcgctgtcgtgatcttcctcttccttggttcagtcgagggattcagtacaaagagccagccttgcacatacagcaaggacaagtactgcaagcctgcccttttcaacgcgctctttagcactgcatctttcttgctgggagcgatcacctctttggtctctggttaccttggaatgaagatcgccacatttgccaatgccagaactaccctggaagcaaggaagggtgttgggaaggcatttatcattgctttcc

SEQ ID NO: 41685 - DNA, 199 bp, Oryza sativa
  Clone ID: uC-osroM202039f01a1
atctaatactactatcgggtttatgtatatgtatgtatgtactcaatacaccaaccaactcgagcatacaaatggaattgcaggctggcaattatacatgtcatttcttgaatctttttggacaagggtgggaggatggttgggtgtctttttggaacaaccgaggggaaaaaaatccttgcgggaaaaaaaaaggagg

SEQ ID NO: 41686 - DNA, 287 bp, Oryza sativa
  Clone ID: uC-osroM202039f02a1
aaaaaaccagccaaccacaaccatgattctataccagcagagcgatgcgattcattttctttaatgatttacaacacacgaacagtttcactaattatagcaaaacctgctaagctctatgcttacacaaagcgcgttatgccccttggccccttagcatacaagcccaaacagaattgcaatggaacaaggcaaggaaaaagtgaacacaaatatacaaccaacgagccagtcaatagaaatgagagacctataaccatccctagcaatgtactcctcaatggcct

SEQ ID NO: 41687 - DNA, 313 bp, Oryza sativa
  Clone ID: uC-osroM202039f03a1
actctcagaaacgcacccattacacgatgaaaaccaatcaaacacgaaaaaaaaaaagcacaaaagaccgacaaacaacgcctgcgacgacggaggcatgtgggggccagagaggggcaccgcgtgactgacgctgggccccaccgccctcgatgacaaactcttttatttagacccacgtcacgcgtacccacacacacctacggagtcgagtactaccactccagcttactcaactcatcactcgctacacgcacacgtacgtacaactccggcgagtcgccggcggcggcggcgcgcgcgggccatgcat

SEQ ID NO: 41688 - DNA, 367 bp, Oryza sativa
  Clone ID: uC-osroM202039f03b1
gtttattgatcagtttagctctcttgctcctctagctgaccactctactatacacacacatatatacttttttcttggtgtattagtaagcacacctcatggacatcaagggccaccgtagaggttgagaccccgaccaccgtgctggccgaggaggcgccagtggaggcgacgccggtggccgacgtcgtcgaggtggaggcgccgaaggaggagacgccggcggagccggccgaggctgtggccgtggaggcggctcccgccgaggccgaggtggcggagaccaaggaggcggagccagatgcggccgagccggcggcggaggaggtgtaggaggccgaatccgagtcggccgagccggaaggcc

SEQ ID NO: 41689 - DNA, 279 bp, Oryza sativa
  Clone ID: uC-osroM202039f04a1
acgcgttcgcaaagtcgaaaccctcccaaaaccctaaaccccccatggggccttccgtccccactgcctccgattgcctagcactccgccggctactctccacggcggacgacgaggcggaggcaccggacggggatcccgccgcctaaaaggcctagcataagggccccaagacggcggtgttagcgggggatgagaaggacgcgcggtgcgctgtaccgacgtttctcggcgctaggaggtgcgaaggtaagggagcgttaaccaccagatgaacaa

SEQ ID NO: 41690 - DNA, 279 bp, Oryza sativa
  Clone ID: uC-osroM202039f04b1
atgcgtgttcatttgactctaccggttaaatccatgttacaggagcccatgcatagtctctaacccattaaaacgcaaagaaaccatagggcaactgacaaacagagcctcctacaatgtctcgccagggttgccgagggcaaagtctccgattcattcagggccgactcgatcggtgatcccacgaacctacagcaagggagggagacggactcggactcggagcacggaaccggtatattaaggagggtgaaaagggagcttgagagggggtctagc

SEQ ID NO: 41691 - DNA, 403 bp, Oryza sativa
  Clone ID: uC-osroM202039f05a1
aaggaaaggccaaaattttttgttccattattgaaaaaatagcaaagcccagcaggcattgagagggtataaagaaattagcaaccaaattcagattgcagacactcattgtattcagcctgcatacatggctgttcatgcaaatttgtacacggacaccggtaatttattctgaataaacaggcgcatgttctttcatgtatttattaaggttcatcacttcaagtgtttctgaaaccagtccagcattaaggcgagagcttgtttcccggtttcgagagcaaacgggtcgctggtgttatatcgatcggcaaatccatgggaaacttctggaaaaatcttggcgtagaaatcaatatcggttctttgacccaaggcatgcacatactggtagactaatctt

SEQ ID NO: 41692 - DNA, 417 bp, Oryza sativa
  Clone ID: uC-osroM202039f05b1
tttggttttagggcaataggctacagcttcgattacgatgtgtaccacagttttgtccatggaagactgccctacgagaacatcaagccggaccctgtcctgaagcacattctcaagaacctgcgcatccgcaaactcatattcaccaacggcgacaaggaccacgccgtgagagccctcaagaggctggggctggaggactgcttcgaggggatcatctgcttcgagaccctcaacccgccgtgcccgttgccgccgtgcgacggggaggccagcatctttgacatcgtcggacacttctacatgcccggcgccgtcgtcgacgagctttccaggacacccgtcctctgcaagcccaacgttgacgccatggaggaggcccttaggatcgccaacgtgaaccctcacaaggcgatt

SEQ ID NO: 41693 - DNA, 418 bp, Oryza sativa
  Clone ID: uC-osroM202039f06a1
gataaataacccccattctctttattaattattattattattgcttctaggagtactaatttacatgcaaagatctgaccgatacatatatatactacaggacccgttccaacattgctgttacattctgaatcctgaacttccacggaacaccctcctctttttttcttggaacgtattgttgtcccggccaattctgaattcccacctgatgatcacctgcccggccagggatggacatggatggatggatggttgctcgttctgagcgattcgccggagtcgggagagacagtaggtgtggcctacgcggtcaccgatgtcttgatggcgacgcggtcggagtagatgagcacgtcctccgccttctcggcctcctcccacagctccggcagcgccttcctgatgttgtggatgc

SEQ ID NO: 41694 - DNA, 446 bp, Oryza sativa
  Clone ID: uC-osroM202039f06b1
atgcggttggattcatggcaataggctacagcttacattacggggagtaccacagttttgaccgtggaagactgccctacgagaacatcaagccggaccctgtactgaagcacattctcaagaacctgcgcatccgcaaactaatattaaccaacggttacgaggaccacgccgtgagagccctcaagaggctggggctggaggactgcttcgaggggatcatatgcttcgagacccttaacccgtcatgcccgtcgccgccgagcgacggggaggccagcatcttcgacatagtcggacacttcttcatgcccggcgccgacgccgacgagcttgccaggacacccgtactctgcaagcccaacgttgacaccatggaggaggccctcaggatcgccaacgtgaaccctcacaaggcgattttcttcgacacagcatgaggaaca

SEQ ID NO: 41695 - DNA, 471 bp, Oryza sativa
  Clone ID: uC-osroM202039f07a1
cctagttgtaaattgaactgtatatatcttgaatttgaaaacaaacagctgcccaaattatgttttacactccatcgcattgcactgctgacccaaaaaaaagaactagcaaaatctttctattctagcggggctaaaagaatcgctactttgtcgggggattttgtaccaagaagcggcggtggtgtgatcgatcgatcgatggtcagaagaaggtggttccggcgaagccgcggtggaggaggttgtgggcgatgttgtccctggcgcgcttggcggcctcggagcggacgggggtctccggcgaggtctcgtcgtcgacgagctcgaaccggagctccggctcgagctcctcgccgcgcgtcttgcagatgttgtggaggacgcagcaggcgccgagcacgacggggaggtcctggagcttcacctccgtccgttctggaggcacgcccaccgtgccttgaggcgggc

SEQ ID NO: 41696 - DNA, 484 bp, Oryza sativa
  Clone ID: uC-osroM202039f08a1
gcacgaactaaacagaataatgccaatcacttgaaaattacaaacttcacagaatttcccttcattttggtgcataactttcttagtagcaaagaaattgacataaaattgttcagcaggcttctggcacacaaaacaagataaaacagagtgttgttctcttgtaaacgaagatttatttcaagaccatatcaaagtaacagacatgaggatgccttcagcagcaaaacaactgcatctttcgatccaaaaggcagttagatatcaaggggttgcctcaagaacatctccatttgcttcgccctagtcttgatcgacatatcaaacaccttctgcccaaattgaataactagccctcccatgatgctgtagtcaatcttctgttcaatcaagatagttttgttctttccaagaatatcttgcaagggctccttaagttccttctcctcttttttggggagtgggaaaatgtcctgacaaggac

SEQ ID NO: 41697 - DNA, 222 bp, Oryza sativa
  Clone ID: uC-osroM202039f08b1
tttagtgactttcccctcctctcctcacctcgggctgcttctactactcctccgccgcaccgagggtttcgcctccgccttccaccgatgccgcagaggggacgaaccgaggggcaggaatggcggtgcggtacctcacatccggactccccctgctacgcgcccacggatcccaggagggctcaaggggcttcgcgtccaacgtggcacagccgaacggga

SEQ ID NO: 41698 - DNA, 152 bp, Oryza sativa
  Clone ID: uC-osroM202039f09a1
tcgcgatctagaacctcagcattgtgattcttaacaccataatgggacagagcaaaagcctccgaaagggagcttttaggcagaagggttctcccacttgaggggctttaccaccttccaggggaagtctgggtcgtcccttccgaagtgac

SEQ ID NO: 41699 - DNA, 319 bp, Oryza sativa
  Clone ID: uC-osroM202039f09b1
ttgattgtgccactgtccgtattcgtcgacacatacggcactggcaggatccctgtcatggagatcctcaagattgtgaaggagaacttcgacttcaggcctggcatgatcatcatcaaccttgacctcaagaaaggcggcaacggacgctacctcaagacggcggcttacggtcacttcggaagggacgacccagacttcacctgggaggtggtgaagcccctcaagtgggagaagccttttgcctaaaagctccctttcggaggcttttgctctgtcccattatggggttaagaatcacattgatgaggttctagat

SEQ ID NO: 41700 - DNA, 289 bp, Oryza sativa
  Clone ID: uC-osroM202039f10a1
atactactagtaattcacacgagtggaattttaagaaatgaaaaattcatcagtcttatttgacctgtctctcagcagttacaaaggcacaaaactacgtgtacatgtgcgtacgtacgcgtatcccaagtgtggtgtatacgcgtgtactgtttccggtgtggcccacgtggcagtggcctgcaacgaatcaacaaattggatctcactccctagctagctaccactaaccacctactatactgtatatgtatgctactacgcgtgtaccagagtattgtatgtgtgt

SEQ ID NO: 41701 - DNA, 536 bp, Oryza sativa
  Clone ID: uC-osroM202039f11a1
caaattcaacagtccatattaatatgataaacttgatgattaagcacttcaaattcaaagtcaaagcaatctctttagcatataaaggtacaaaaacaaacaacacagctaagtctagaaaagagacaaaagagtcaccgagtgagttaagcccagcatggtgtaccaggaatgagatccgcctatacaaactaaatcccactcgcatggtaacaccctaaagagtaagaggcacactttgcacctactatatatgatgatagagcatcagctgcccccatctactgacaactctaggggtataaaccaccggacatcaaacctatacggcccctgccaacacaaggggcacgcttagttccatttatttggacaacagtaagagctggtgcatcatggtgaaggatacagcaccagccggtttgactgacagtacatatctgctatcatcatcagccccttcagtaggaaccacggtgagggtaagaattaccctgcccaccccttgctcccatgcttccataccctctgccacc

SEQ ID NO: 41702 - DNA, 502 bp, Oryza sativa
  Clone ID: uC-osroM202039f11b1
tcgctgttagaatgctccatcgatgctttcatcatctcagtccatgcagacacctttacagatgagcagcaaagatttcaaggcagttgaatcaaaaactagggttgtagaaccattgctacctgatccaccgtcacgtgctcttcctgaaaataatgagcctatattgccattgccgaaacaaacacctcaaaagtacaatggagctggttcacacagcaatcaccactacaggggccgtggaagaggtagaggcagcgcgttttcgcagtcagtaacaaattttactgaagaatttgatttcatggccatgaatgagaagtttaacaaagatgaagtctggggtcatcttggtaagaaatcccattcaagggacaaagatggtgagctgggcgatgatgtgtttgatgaagactggaggatgaggaaacagaaaatcctgagctagctgctaagcctttttatgtaaggatgacttttttgattccctcactagtggaac

SEQ ID NO: 41703 - DNA, 307 bp, Oryza sativa
  Clone ID: uC-osroM202039f12a1
agccaatggaccaaccataatgctaatattgcaatcacaaacacttaacatgagtttcgaagatatgttacattttcaacaaacattagaattttacaattgcgcactaatataaattacacttctttccccttttatttatgacacaagatggcttcaaacgaagcacttgaagccccctattaacacagcaccactaaatcatcaggatccacagttcctaaatacacagcacggtaggaacatataagttacttgccagttgaaatgaaacagggcccaacgaagggaatgggtggggttttta

SEQ ID NO: 41704 - DNA, 291 bp, Oryza sativa
  Clone ID: uC-osroM202039g01a1
cagacaccatcaaaccagacttaaggatccacattacaggaaaatcttacaccatgaaacgggacacgaccaaggaccagaccagacaaccatagcttcattggggaagccaatttggcaacatcatgatttttcaccagcaagcggttccatggctattaggaagaagcccttcacacggggggagagcaccaagctgaaagggggccccttttggaaggtgaaaacccgaagggggggggcattcttaagtttttttccaggaaaaatctaaccctttttgtccggggg

SEQ ID NO: 41705 - DNA, 399 bp, Oryza sativa
  Clone ID: uC-osroM202039g01b1
ttgctggcacgcagctttggatggccgcaccctggccgactacaacgggcggaaggagttcaccctccaccttgtgctcaggctcaggggaggcatgcagatcttcgtcaagaccttgactggcaagaccatcacccttgaggtcgagtcgtctgacaccattgacaatgtcaaggccaagatccaggacaaggagggcatccccccggaccagcagcgtgtcatcttcgctggcaagcagcttgaggatggacgcaccctggccgactacaacattcagaaggagtctaccctccaccttgtgctcaggctcaggggaggcatgcagatcttcgtcaagaccttgactggcaagaccatcacccttgaggtcgagtggtctgacaccattgacaatgt

SEQ ID NO: 41706 - DNA, 329 bp, Oryza sativa
  Clone ID: uC-osroM202039g02a1
gggctcacaaaatgcacttgaagcaatgtaatccatgaacgttgacaggaaggaagctaacacgcagtaaccagatgcatcggcattcaaaattgattctcacttaacattatgcaatactttaacatggagctacttaaacagatctaccaaatacattacataatggtaagtaactcagttttcctccagtagctgacgaatgatgatccgcacatttcctaccagccagtaggtgccggagcactgcctttctcccatccaggggcggcaggaggtgcaacagcaacaacggcggcaggaggaacagcaactggattccacccttt

SEQ ID NO: 41707 - DNA, 302 bp, Oryza sativa
  Clone ID: uC-osroM202039g03a1
gaggtacaacaggtaatggtaatatagtcaacaacagttgcggtcaactagtacaatctgaataaatcaggttccgaaagagaaaagaaaggtaaaataaaaaggaaacaggctcctagtttatggaaaattgaagccaacctgcctgtcaaattcaaatgacaccgctagccgggagaacattttcagcagattggcgctcagcagaactttcagtggttgttgcagttcacgcatgtcacaaaatgtgtcattggcttatcaacacttccagtctgcagctggtagtaagtcgtctttcg

SEQ ID NO: 41708 - DNA, 452 bp, Oryza sativa
  Clone ID: uC-osroM202039g03b1
atttattagagataaaatccgggaactacttgcagatgccttctccagggttcatggagagactagcaaagatgacagggaggaagtgagaaacatcttagatgaagtggatgcacgagatccattcagagttgctgggaccgttgaatctgcggtatttgagaggctgggacgttcaactggggctcacaaggcaaaattcaggtcaataatgttcaatcttagagctggcatcaacactgatttccgaagaagggttctacttggccaagtgaggcctgagaggcttgttgacatatctccagaagagatggctagtgacgcgaggaagcttgagaattagcagatcaaggagaaggctttgctccattgtgagcgtggaggaaccccaaaggcgactactgatcagttcaagtgtggcaggtgtggcccgcgggagacgacttactacc

SEQ ID NO: 41709 - DNA, 395 bp, Oryza sativa
  Clone ID: uC-osroM202039g04a1
aggaaaaatacaagttcgtgaatggcgataatacttaaagctacctccaaatagcgtgtagcattgcgtagcaaaccaagcatataacttaggacaaacattcagttgcagcttcacatcatcgctgcttatcataactgcaataacagcgcagatggagcataaactaagtatatttcgtagttctagcttatatataatatcagaatcaccaactgtgaaccatccacaggatggtcgggggactactgatcagaatctactcctttgaggtgtggatggcagacacggtggagaccatagaatccacgccacatttgttgcggacgttggagcccctgcagatcttgtagtacccatgctcttcccaatttttgccccaagagttcttggtg

SEQ ID NO: 41710 - DNA, 353 bp, Oryza sativa
  Clone ID: uC-osroM202039g04b1
gcgtgtcttttaacctcgacgactgcatacgcatacgccgggggctccgcatgcggctccggcgcgaactcgccgccaagagggggatggcgaacgtggagtacaaaggatcagacgtggagcacacgggggcgctctcaagatcgggggttccaaacacagctatttcgttgaatgtaagtggatgtactaatggaggcaaagggtggcaaaaagaattctagcagaagtcgagcctggatgtatgaagctccccgtgattacagcattgaagacgttcgacctgccggaggcgtgaagaagttccagtctgctgcttactccaactgggcgaagaagccaacctgatagcc

SEQ ID NO: 41711 - DNA, 336 bp, Oryza sativa
  Clone ID: uC-osroM202039g05a1
agaaaacaacagtttcttctacgggtgaatgaacatctttgatattacaaggttccctcggaatccacatacaacacggatagtaatgctgagagaccaggaacagcaggcatcagaaatggttccaagaactcttcgcaatgataaatttagtccatcctgcccttgatcacacactcttttacttcggttggtgtcacaagcagaacaaagcctccccaaccactgaggcaatcacgatcaactgatgactgcagagcttgtgagatagtctcaaagagttcttcaggttccatgtttggtttgtacatggactcacaagcaccatattgagac

SEQ ID NO: 41712 - DNA, 451 bp, Oryza sativa
  Clone ID: uC-osroM202039g06a1
caccaaatagcacaatcgaaaataaagagcaaaggatttagcactgtaagtactcgcattccacaacaaccgaagggcaacaataagactcagagcatccaagtttttaaccgaatagaaataaacgagttttaaacgactaacatagtgcacattgcgagcagatattaacggtccatgcaacgagtgccatggccgtgggcaaaacttaacgaacgctaagatatctcaaatgcagccagcataaccaccacttcaacgatgctcatttcttcttggcggcagccttggtcaccttggcaccggttgggtccttcttctccacgttcttgatgacgccaacagccaccgtttgcctcatgtcacgcacggcaaaacgaccaagaggagggtactcagagaaggtctccacaaccatgggcttggtgggaataatttaaccataccagca

SEQ ID NO: 41713 - DNA, 459 bp, Oryza sativa
  Clone ID: uC-osroM202039g07a1
gggttctcattatcatatcggtccaaatctctgaacctggcatttacaaattttaaagaactccattggaagtgctgggggctaccaagcatgcagggcctgttaattggatttacaccggggaaaaccagatgggttaaaattacaaaaaagggaatagttaattttttgggggaaaaattattgggtattatttaccaaaaattagaacctaattggccgaccggtggagaagaattacgacgacgaccacaagggctggcaccaggatgatcgggtccactctgactcgatccgatgagttgcgtgctagggcttgacgacgtcgacgtgttcgctgttgtcggttcgacgtgtggccatcttcccgatcgacgacgcaatgctgcccatgatgctgctggtgctgcccccgacgccgttggggtggctcaccgcccggcgagacctcctgtgcag

SEQ ID NO: 41714 - DNA, 333 bp, Oryza sativa
  Clone ID: uC-osroM202039g07b1
tttgattccacccacacatcccccccccccgggggccttgtcgtcgagctcgccgggcggccggcgagagggcgtgcgcggcgatggggcagggcgccagctgcgggcggcccagcgaggaggtggacttcttcggcgcggcgcagtcggacgacctcgcccgactcgccgccgacgttcgctcacgcccttctctccttggccgcaccacgctcttcgaccgtctatccgtactgcacatcgacgccggccacgggcaccttcagggggggataatggcggtggacctttgaaggcacccggacgttgttaaccagcccaagcagacttagc

SEQ ID NO: 41715 - DNA, 273 bp, Oryza sativa
  Clone ID: uC-osroM202039g08a1
gtagattctgtaaagagaggatatggttctacagattttaccatcaccaaagtgaagagagtccacagaagaatcgagttacgcaaaccttgggaaaactatacaaaaattaccccccggtatcacacttttatagcctttttttattttatttgtcagagttgcatcaggggcaaggccataaccgaaccaaaaacagaaaacattacccagaataatcaaaaaggccacttgctttttctggttttggttggcttggggcttccgccgaag

SEQ ID NO: 41716 - DNA, 353 bp, Oryza sativa
  Clone ID: uC-osroM202039g09a1
ggaggttcttaaaaggcgccttaaataaggtaaacagtcgcattacagctagcagcaaacatgagttcgcgaattgatcaacataacattaggcaaaagagctcaaaaaaggatagtctggggcagatagttctatatccttgcaaacaactcgctatagcaaaactccaggcagacgcagcagcagattttaagcgttggcagcagcctgggcggcagcatcccgcttcctttgctcctcgatgatgctgagcttgatgcccttgcccttgggcaggctcacccaaggcttgttgcccttgccaatggtgaacacattgcccagacgggtggcgaattggtggcccagggca

SEQ ID NO: 41717 - DNA, 389 bp, Oryza sativa
  Clone ID: uC-osroM202039g10a1
ggaggttcttaaaaggcgccttaaataaggtaaacagtcgcattacagctagcagcaaacatgagttcgcgaattgatcaacataacattaggcaaaagagctcaaaaaaggatagtctggggcagatagttctatatccttgcaaacaactcgctatagcaaaactccaggcagacgcagcagcagattttaagcgttggcagcagcctgggcggcagcatcccgcttcctttgctcctcgatgatgctgagcttgatgcccttgcccttgggcaggctcacccaaggcttgttgcccttgccaatggtgaacacattgcccagacgggtggcgaattggtggcccagggcatcctcaacgtggatggtcttgaagctgcctttatgc

SEQ ID NO: 41718 - DNA, 213 bp, Oryza sativa
  Clone ID: uC-osroM202039g11a1
agcacaaattctcactgtttgataccacacgctcacacatgaaatttttgtagcttttttttttttttttgcacaaccttctcctcgtttgacgaggaggaaacaaccaagcaaggtaggggataaaagtgaagtgcaaaaaaaaaaacaagtggtgggtgaagaatgaaattacaagaggactttttcttcgcttccaccattcgccccttc

SEQ ID NO: 41719 - DNA, 505 bp, Oryza sativa
  unsure (1)..(505): unsure at all n locations
  Clone ID: uC-osroM202039g11b1
tgccttgctcggttccaaacgcaaagcaaccaattccatttccgttcccctctcggcgaacagcctcgcctcctcctcctcctcgccgccgacgccgacgccgacgcctccccggcatttggttcgcgcgggtggtgccgtgagatacgtggtggacggggtagggatggagtcggacgcctccacctcgccgcgccggcggagcaccagctgctacagcgacagcggcgattcgtcatgctccgagccgttcagcgagtgcggcagcgacgacctctcgttcacgccggctgccgccgcgggaatccaccggctgctgctgtcgtgcgcggcggaggcgtcggacgggacgatctcgtcgctcgtcgcggagctggagtcgccgtcgtcgtcgctggactcgctacggcgcgccgcgatggagctccggctgctggcgaagcacaacccggacaaccggattcgcatcgcggtggccggngcggtgcgttcgctcgtcgcgctg

SEQ ID NO: 41720 - DNA, 516 bp, Oryza sativa
  Clone ID: uC-osroM202039g12a1
cgatataaacggtgcttctgcatttgcctttgcattgtacaacatgtaacagcttttatgtttgtacaaaccaatgttcctagacagtatggagaggtacaacaacgagttacagtcaaggtgtggctacccgttaattcataaaaagcaatggtacagggcagctgacataaattaaggtgtgtatcatgcccaaatcaacttcgcgctttactgaagcgaaagaacaacggggcaccagaagcacatccatctcactgttgacgaaatcagattcaccaaatcaggtggaacattgcgcttttatgggaaccagcgagaggaaacatgcatctagcaagaaaaactagggctacttgaacagtcagtcttcaaataaagtggagagcaccaggccttgcacaaaggttgctctgtcagtggcttgtttccgcttttgttccctttcctcactcgtgagcgatgagtcgatccttgattcccatggctgagcaggagtatccttatgaattgatg

SEQ ID NO: 41721 - DNA, 272 bp, Oryza sativa
  Clone ID: uC-osroM202039h01a1
aaagaggtacaacaggtaatggtaatatagtcaacaacagttgcggtcaactagtacaatctgaataaatcaggttccgaaagagaaaagaaaggtaaaataaaaaggaaacaggctcctagtttatggaaaattgaagccaacctgcctgtcaaattcaaatgacaccgctagccgggagaacattttcagcagattggcgctcagcagaacttccagtggttgtttgcagttcacgcatgtcacaaatgttgtcattggctcatcagcac

SEQ ID NO: 41722 - DNA, 297 bp, Oryza sativa
  Clone ID: uC-osroM202039h02a1
ggaacggtaaaacaggatcttcgttaatgtattcttgagatgataaattatatagagtacaaattggagaagataaataagagtacaaattggatcgagctatgtacacagatcactgtaagataaaaggcaggcagtagagtaaataagctgtcccctcaaaatgcgacaacgatatatggaggcacggaagcagaaatttcagaaaggctccacgctgcctcattccctctccttgccgattacatgttatcgatgagctcatgcggtgttcagcttaacgagcgttccctttaa

SEQ ID NO: 41723 - DNA, 291 bp, Oryza sativa
  Clone ID: uC-osroM202039h03a1
ggcaaacagctcacaaaatcgcaatacattcttgtttaagcaaaacgggtcattctcaaaagcaatcggactgcagtttcaagacatgtacatacatttttcgggtccatgcaatcaactgtatttagtagtgtagaatgcactgctgtgctcccctggcctccttgggttgagatgataaaaccgcaaatcttctatacaaccttcatttaagctgttacaaaaaaacatcgccttatttgccttttctacagggttttttacaaacaaacctccctgggaaccaaaatc

SEQ ID NO: 41724 - DNA, 334 bp, Oryza sativa
  Clone ID: uC-osroM202039h05a1
ggggaggatcaacgatcctacgggaacattgattattatgctcaaaaccacaacattccttgcctttcaaaaatgttgggtaacaccacatatagcagcaatttttaacgtgttattgggcacttacttactaacaaataataggcttttgtaacgccagccaggttttttagaaaaaacaacccagtggcattttgcattatttcccttgggtgccaaaaaaagcacggggattgaacaccaaatattttttttaagcaatatggggtggaaacccgcttggtgcctttggggcatttatttctaaaaaaaggttacattaagctgtaaattt

SEQ ID NO: 41725 - DNA, 494 bp, Oryza sativa
  Clone ID: uC-osroM202039h05b1
ggtcattaggggttgcgccgtctgggttaaagaacagcagtagcaccagcatgggtgctgagaagttgcctgatcagatgcatgatctgaagataagggacgataaggaagttgaagcgactattattaacggtaagggaacagaaaccggccacataattgtcacaactactggtggcagaaatggtcagccgaaacagacagttagctacatggctgagcgtattgtagggcaaggttcatttgggattgtcttccaggcaaaatgtctggagacaggtgagacagttgctatcaagaaggttcttcaggataagcgctacaagaaccgtgagccttagaccatgcgtctttttgaccacccatatgttgtagctttgaagcactgttttttttctacaactgagaaggatgaactgtatctaatactgggaattgagtatgtgtctgaaactgttcataatgatgtgaagtataataacatggatgaacca

SEQ ID NO: 41726 - DNA, 215 bp, Oryza sativa
  Clone ID: uC-osroM202039h06a1
ggatcaactacaccataataaatacattcttaaactgctctagaacatattacagatcatcagctatgggaattctcaattctcaggtgggtgagggttagtaggggagggatggtgtgggtgcaccggtttcatgttcaaagtttcgccatcgcaacatactgcttactcaacctacactgggtcaacaaggttggttcataccaacaaccaaa

SEQ ID NO: 41727 - DNA, 288 bp, Oryza sativa
  Clone ID: uC-osroM202039h07a1
ggtggtgtacaccgatcctctgcagtacggcggcgccccgggggaggcgtggttccccgactcccggtggctgccgccgaccggcgtgcaggtgggcagcctgttccggggcgtgggcgacccgacgacgccgatgtgggcgtcgtccgaagggtgcgagcgcgtgagtgtggaggaggcgatggacaccgacgacatgccggggatccccgcgctgccggtgtccgcgcgtgacgcggcggagatccacgccggtctgggcggcggaccctgcgccggcggactggc

SEQ ID NO: 41728 - DNA, 350 bp, Oryza sativa
  Clone ID: uC-osroM202039h07b1
ggggtggttttttgtttatcatggagtgcttatttcttaatcccattgacgttcaagcgttttctcagagaacgcaatacaaaatcaaagcagtattgtatatctataagctatacacataatacaactacaaaagtagtacacaagcatgtgtacaaaaaaatctacacaagcatctgtacaagtaacattccaacttcgtgcttgaatcgatcgccatgaattgggtatatcttcattcttttccttggacttaaggaatcaaattgtaaagaggatcaatagccagcataacatgactattcatgcaggtcaaacgttctttggcctgttggattgtttgattgctg

SEQ ID NO: 41729 - DNA, 318 bp, Oryza sativa
  Clone ID: uC-osroM202039h08a1
gagttcaaaatttgtgttgtaagttgtaacacaaatgatacatttacaaggttacatactaaaatactacacacctgaaatagtactacctccatactatcatgcttatttatgttcattgctacatagcgatcatgaaaaatcaaaagcaccatgaagacaccagtcatgcatgatcactttgatcaaggtctggttggtcaagaaatggagtgcctccgatccttgggcggcttcgtccgcaccctgccgccgccgagcacgtccgatcgcaagaacgggttgagccttccgagctttttggacatgctgttcatg

SEQ ID NO: 41730 - DNA, 264 bp, Oryza sativa
  Clone ID: uC-osroM202039h08b1
tggatagagagagagaaggtcagggatgcaggctggggctcggttcgtctcgcctgcgatgaagcgaaccagcgactggatactttcgcaagaactcccaagcgatattaccatcaaagtcgacgatgccgccttcaacctgcacaagcttccattggcatccaggtgcggctacatcaagaagcaggtgtcaggagtcggcggcaacaaggcgacgcacctggagatcgccggcatgcccggcggctccaagtcgatcgagct

SEQ ID NO: 41731 - DNA, 423 bp, Oryza sativa
  Clone ID: uC-osroM202039h09a1
aatcaaatggagagtatatcttttcttttattcccatatcaaatggtacaaatattaaactgtctaagaacataactcgaatccgtattaaccaagagtaaagaaacaaataaatacaaacaaaatacgcctcttacaacaacatcatttttcaccagcatgtgttcccctccctattagaagaagcccttcacttcagctcacaagcagcagcttcaagtaacaaaagaaaaaaagctcatcacctcatttgctcagttcatggcaggtcctccttcatgccgcggacgaactcctccgagtgttccttggtgacgcagctggcgagcatccgcgtgccgtcgagcggcagcggcgccttgaggatgacgacggaggcgatgaagtcgttgttgacaagcggcccggcaaacttgggcgggc

SEQ ID NO: 41732 - DNA, 396 bp, Oryza sativa
  Clone ID: uC-osroM202039h10a1
gctacataaacattgaaattaacgtgattgcaagtttgcaacgcctgggttctcgatcaaaagggcactacactgttacatttttttcaacttttggatgacgagtcaaacaacatatgtttcgcctggtttcagttagaacacaagcccaaaagattacatgttttgctacgattagaacaaaaaacttagcataggcaatgtctgctccccgcaataaccactgcatttgtttagcaaagcatccattgggctaactcaggttcttttatctgtactgttcaggtagccgataacctgtcatgactattttggctgcaaacatcttgccggtctttggcataatatgccagtgcattgtcaggttaaaatcctttcctttgaggttgcttccct

SEQ ID NO: 41733 - DNA, 395 bp, Oryza sativa
  Clone ID: uC-osroM202039h11a1
aggaggaaaacatcgaagtactttttcatatagagtgcatacagttttttggtaccatatgcacacagctcgcatatatacatacagacacatacaaagttaacatgaaaagcacacctggaagaaacattgagcaaacaattatgcagcatagctcaggaattacagaagctgaagatgatcaagaagctagctgacgcagaaagccagaaaccgaggataaactagctctggcaggcaaacgaacagctagctgatcattaacagcgagctgaccggaggccctctctgatatcgatatatctacacttcaatgccttcggtcatgcattcagcggcggcggcgtctatccgcggaaggaggaggaagagccgagcttggaggagctggccct

SEQ ID NO: 41734 - DNA, 368 bp, Oryza sativa
  Clone ID: uC-osroM202039h11b1
ataggtgtggttttattctttgtctccttcttttttccccggcggtggtcgtcgtcttatttcctgtgtaggaggagccgctgatccggaaagtggacggcggcggcgacgacaacgagctggagctgaacgcggagcgccacttcgccagcttagaccagaggttcgggaagtcctaccgtgacgccgacgagcacgcgtaccggctctccgtgttcaaggccaacctccgccgcgcgcgccgacaccagctgctcgacccctccgcggagcacggcgtcaccaagttctacgacctcaccccggacgagttccgccgggcctaccacggccttcgcacgaagagccgagcctttctgcgggggctc

SEQ ID NO: 41735 - DNA, 458 bp, Oryza sativa
  Clone ID: uC-osroM202039h12a1
gaacattagcagaaggcaaaggaaatttcccgcaaatacttattcatatgttttgacaacatttctcccgacgcatgctcattgtggcagacgcagctgaccacctagagcttttagttcaccattattatttagaccaagcatacgtcccaagatcagaacacatgcttacaagcgaaaatactaatagcctggctggctgcttcacagaataaccaaacgacaacctcaacagataaaaatgccacggaatgaaaacaaagcagcgaatcgtcaccagaagtcccatcttactcatcaaacactccatcattctcctccaacgcatcctctccccaggggagaagattgcccagtttaccttccttaacaggagcagggttcaccatattctcagcctcgaagcagtgcagaacagatttgggcgacccaacagcaacaggtacgtcttcatagcg

SEQ ID NO: 41736 - DNA, 131 bp, Oryza sativa
  unsure (1)..(131): unsure at all n locations
  Clone ID: uC-osroM202040a02b1
gnataagctgtggttggttcttgggatcaggttctctgattcttgctgcgcggcctctttcgccatggggaagagtaagaagagcaaggtccgtggcgttggcggcggcgaccacctgatcgacagaagcg

SEQ ID NO: 41737 - DNA, 348 bp, Oryza sativa
  unsure (1)..(348): unsure at all n locations
  Clone ID: uC-osroM202040a04b1
ttttgaacccgctcctcggcccgtcttccgccactttgcagaaaatgggagctcttgattggaacaaagattgttcatcagcaccacggatggcgtctcattagctgtatctggctccatgctggcctaatccatttggttgtgaacatgctgagtttactgtttattggaatccaccttgaacagcaatttgggttcgttcgcattggtgccatatacctgctatctgattttggcgggagtgatgttgtctgcgcttttccttctgaataactacaccactgntggagcctctggagctttatttggactgattggaacactgctttctgagcttattatgaactg

SEQ ID NO: 41738 - DNA, 54 bp, Oryza sativa
  Clone ID: uC-osroM202040a06b1
tacctcatcgccaccatggtggtgggcagctacctgcggaattccgggatgttc

SEQ ID NO: 41739 - DNA, 102 bp, Oryza sativa
  Clone ID: uC-osroM202040a11b1
tacaatccaaaaggcttacaagagaagcaaccatccgtatgaagatggccatggctaccccccccgcatccaccgtttccttctccgcccgcccgcccgcct

SEQ ID NO: 41740 - DNA, 355 bp, Oryza sativa
  Clone ID: uC-osroM202040a12b1
tacaatccaaaaggcttacaagagaagcaacgcgatcctttagaagatggccatggcgacgtcctccgcatccaccgtcttcttctccgcccgcccgttcttcttgtgcgcttttcttcttttctgtttttcttttccgttctttcccttttttcttcttctctttcttttcttttttttttttcttcttcctttttctccttttttcttttctctctctttttttcttttctcttctcttttctctcttttctttctttcttttctttttttttctctctttctcttcttttcctttcctcctcttttttcttttttctctttttcttcccttcttcatcctctttcttttttc

SEQ ID NO: 41741 - DNA, 125 bp, Oryza sativa
  unsure (1)..(125): unsure at all n locations
  Clone ID: uC-osroM202040b01b1
ccatanctttcttcttcctcctcgtcttcaggactcaattcgtcttctgatagcttagcttgaccggggtgggagacaatgggaggcccctcttcctcctcatcctccccctgaatcccccttct

SEQ ID NO: 41742 - DNA, 508 bp, Oryza sativa
  Clone ID: uC-osroM202040b02b1
ccattatctttcttcttcctcctcgtcttcaggactcaattcgtcttctgatagcttagcttgattggggtgggtgacaatgggaggtggcaaggacaagcatgacgagagcgacaaggggctcttctctaacatgatgcacggcgttgccggcggccatgggtatcctcctcaccagggataccctcctcagggctacccgccgccgccgggagcgtacccgcctcctccgggggcttatccccctcctcctggggcttaccctccaccacctggggcataccctccacagcatgggtaccctcagcctggtggctaccctccacctggtggttacccccaacatggtggctaccctcctgcgggctaccccggatcatctgggcaccagggcggccatgggagtagcggtggaggacacatgggagcaatgctggctggaggcgccgctgcggctgctgcagcctatggggcacacaagatctcttctcatggccatggtggacac

SEQ ID NO: 41743 - DNA, 154 bp, Oryza sativa
  Clone ID: uC-osroM202040b05b1
gaaatgtaaaagaaaatatcagaaaagaatagtaggaaagaaagaatgaacacatgtgtacgctccggtgatcggcgaggcgagccaatgcatttcggagctccggggcgaaggatcagttcgcctttctcggcctctttgctctcttactctt

SEQ ID NO: 41744 - DNA, 381 bp, Oryza sativa
  unsure (1)..(381): unsure at all n locations
  Clone ID: uC-osroM202040b06b1
cgagatccttctcctccctatctccccaaactctccaaacccgcctcctacccatttcgctcgccgcctccgacgccgcggccgccgccaccgacacccatggagcccgcgccgctcgcctcgctgcaggaggagggtgaggatgtttncctatcatatcccttaaaagaagctgcattaagttgatgattcaagtgctgccacaatactggagcatggagtaacacattggaactttcttttgcaacaagctttaaactatggcgtggcctgttggttatttggccgtcaagctattcctggctttccatttttaaacatatggggcaagcattaaaatttccattccctgtagcattgacagcttttacagttcttcac

SEQ ID NO: 41745 - DNA, 405 bp, Oryza sativa
  unsure (1)..(405): unsure at all n locations
  Clone ID: uC-osroM202040b10b1
tttcctctcgatctccattcgtttttgagttcctcgtttgctccgcctctctttcactcatgggcaagattaagatcggaatcaatgggttcggccgcatcggcaggctggtggccagggtggcgctgcagagcgaggatgtcgagctcgttgccgtcaacgatcccttcatcaccaccgagtacatgacatacatgttcaagtatgacaccgtccacggccagtggaagcatcatgaggtcaaggtcaaggactccaagaccctcatctttggcacgaaagagtntggcggtgttcggctgcaggaaccctgaggagatcccatgggctgcggctggtgctgaatacgttgttgagtctactggtgttntcaccgacaaggacaaggcagcagctcacttgagg

SEQ ID NO: 41746 - DNA, 292 bp, Oryza sativa
  Clone ID: uC-osroM202040c04b1
ggaagctaaaattgcttaaattctgaaaatcatatcgacccgctcacggcattttacaagccagctcggtaaaattaaaatttttgccaaccagtactgcagtactcataaggttctacagtattcataaaagggtcaactaaatgaaaatattgttctccacaagctgcctactgtagaggagcatcaggatccaatcttttctggattgcagctgcagccctaaaattgcccaatctgtactggtacatcatttcctccccgagccgggcctgcttttttattgcttgag

SEQ ID NO: 41747 - DNA, 497 bp, Oryza sativa
  unsure (1)..(497): unsure at all n locations
  Clone ID: uC-osroM202040c06b1
ctcgtgccttctagggtttcctcttcctcgcaccgcgccgcctcgcctcttcgtccccagattcagatctactcctactcctactaccaaggttgttgccatggctcccgctgttgaagccgtggagaagaagacaggctcagcccccgtcaaggcccctgctctgaatgaaaggatactgtcatctatgtcccggagatctattgcagcacatccatggcatgatcttgagattggacctggtgcaccaactatattcaactgcgtcattgagattcctaggggcagcaaggttaaatatgaacttgacaagaaaactggactgatagtggtggaccgtgtgctctattcatcagntgtgtaccctcacaactatggattcattcctcgcacgctgtgtgaagacagtgatcccgtggatgtgctggttataatgcaggagcccgttataccaggatgctttctacgagcaaaggccattggtctcatgcctatga

SEQ ID NO: 41748 - DNA, 529 bp, Oryza sativa
  Clone ID: uC-osroM202040c07b1
ggatcttgggccatgaagctggaggcattgtggagagtgtgggagagggtgtgaccgaactcgcgccgggcgaccatgtcctcccggtgttcaccggcgagtgcaaggagtgtgatcactgcaaatcggaggagagcaacatgtgtgacctcctcaggatcaacgtcgaccgcggcgtcatgatcggcgacggcaagtcccgattcaccatcaaggggaagcccatcttccactttgttggcacatccaccttcagcgagtacaccgtcatccatgtcggctgcctcgcgaagatcaacccggaggcgcctctcgacaaggtctgcattctcagctgcggtttctctaccggttttggtgcaacagtgaatgtcgcgaaaccgaaaaagggccagaccgtggctattatcggtcttggagctgttggtcttgctgctatggaaggtgccaggctgtctggagcatcgaggatcattggtgtggacctgaaccctgcgaaattcgacatgctaagaagtttggctgcact

SEQ ID NO: 41749 - DNA, 554 bp, Oryza sativa
  unsure (1)..(554): unsure at all n locations
  Clone ID: uC-osroM202040c09b1
ttttgttcgcgcccacttgcagccaggccaccgccgccgccgccgaccgaagcagccgacggcgaccaccgccgcggcgagggatcggtgcgtaagcttggcggcgggccgatccgcacgcgggagggagcgccgtagccgcccttccccccaccctctacaccccctcgccggcggcgaacacggcgcgcgatgggaggcgcgcgcgcgcaggtgaacaagccgcacaagacacgctttgccttcaaggcgttgcgccacgcgcacaagatcgataaggtcaggaccgggaagccggagggcagccaccgtgccgncgtcaagggggcccgcgccgcgcgcgttcagcggagcaaggcgatccgtgatcagaaacgtgctgctttgctgaaggagaagcgctcttccgttggatcttcgagtgcgccccgtgtcgtgttctttttggcctttcctcgtcggcagatgtcagatcacttgccaaagaccttttaaccattgcttctggtgatgaagagacaccaacttcttccagctgtgctttgctacatata

SEQ ID NO: 41750 - DNA, 526 bp, Oryza sativa
  Clone ID: uC-osroM202040d01b1
gttctgtcggctactccttcctcctcaagaaggacaaggccataattgtgcaaccggagcgtgtcatcgtcgggaatggcccggcgtttgggtgcgtcatgatgaaggagttcttatctgagctggctaagcgcgtcaacaagaacaccactgcttatgagaactacaagaggatcttcgtgcctgagggccagccgctggagagcgagccgaatgagccgctgcgcgttaatgtgctcttcaagcacgtccagaagatgctgaacagtgacagtgctgtgattgccgagactggtgactcctggttcaattgccagaagctgaagctccctgagggctgcgggtatgaattccaaatgcagtatggttccattggatggtcagtgggtgcattgctcggatatgctcagggcgctaaggacaagcgtgtgattgcctgtattggtgatgggagtttccaggtgacggcacaggatgtgtcaacaatgattcgctgtgcacagaacagcataatcttcctgatcaa

SEQ ID NO: 41751 - DNA, 532 bp, Oryza sativa
  Clone ID: uC-osroM202040d02b1
gctttgtcggctactccttcctcctcaagaaggacaaggccataattgtgcaaccggagcgtgtcatcgtcgggaatggcccggcgtttgggtgcgtcatgatgaaggagttcttatctgagctggctaagcgcgtcaacaagaacaccactgcttatgagaactacaagaggatcttcgtgcctgagggccagccgctggagagcgagccgaatgagccgctgcgcgttaatgtgctcttcaagcacgtccagaagatgctgaacagtgacagtgctgtgattgccgagactggtgactcctggttcaattgccagaagctgaagctccctgagggctgcgggtatgaattccaaatgcagtatggttccattggatggtcagtgggtgcattgctcggatatgctcagggcgctaaggacaagcgtgtgattgcctgtattgttgatgggagttttcaggtgacggcacaggatgtgtcaacattgattcgctgtgcacagaacagcataatctttcctgatcaacaacc

SEQ ID NO: 41752 - DNA, 528 bp, Oryza sativa
  Clone ID: uC-osroM202040d03b1
gttgttgctgctgctcctcccgttttccgatcgcagccatgggaacccgcagcgtggccttggtgctcctcgcggccgtgctgctccaagccctcctccccgcttcggcggcggagggtttggtgcggatcgcgctgaagaagcgcccgatcgacgagaacagccgcgtcgccgcgcgactctccggcgaggaaggggcgcgccggctgggcctccgcggcgccaactcccttggcggcggcgggggtgagggcgacatcgtggcgctgaagaactacatgaacgcgcagtacttcggggagattggcgtcggcactccgccgcagaaattcaccgtcatcttcgacactggcagctccaacctctgggtgccgtcggccaagtgctacttctcgattgcgtgcttcttccactctcgctacaagtccggacagtcgagcacttatcagaagaatggaaaaccagctgccattcagtatggcactggttcaattgctgggtttttcagcgaggataggtgtacagtag

SEQ ID NO: 41753 - DNA, 532 bp, Oryza sativa
  Clone ID: uC-osroM202040d11b1
tcggttattgttgatatgcagaataacgttgtcatagaatttgaagataggaagttggttcctctccccccaccagatcatctgagaaactacactcctggggaaacgagaggtggtgttgatcgaagtgatttgaaacctcttattatcaatcaacctgagggcccgagcttccgcattaacggatattttgtggaatggcagaagtggaacttccgtattggcttcacccctaaagagggtttggtcatctattctgttgcatatgttgatggcagccgtggacgtcggccgatagctcataggctcagctttgttgagatggttgttccttatggagatcccaatgaaccacattatcgcaagaatgcttttgatgctggagaagatggacttgggaagaatgctcattctcttaagaggggatgtgactgtttaggtttcataaagtattttgatgcacacttcacgaattttacgggtggtgtggaaacaaatgagaattgtgtatgtttgcatgaggaagaccacg

SEQ ID NO: 41754 - DNA, 227 bp, Oryza sativa
  Clone ID: uC-osroM202040d12b1
tctgcatataatggattctctcctatatatatataggacttatgaaatgacttagctaaatgatttatcattttagaagtgattgcaagactccaattaatgaaacaaactgttcaatcatccatatattaaaaatattactgaattttaaattggcaaatcatgatatatgggttcttgttctctcttgcagataaccaatatcatatgtatgatatagagttccc

SEQ ID NO: 41755 - DNA, 482 bp, Oryza sativa
  Clone ID: uC-osroM202040e01b1
attttcattcgcatccacgagaccactcgaacccgacccgcctcgccgccgccgccaccgaagtaatcccttaattggtcaaaatgtctcgggaggagaatgtctacatggccaagctggccgagcaggctgaaaggtatgaggagatggttgagtacatggagaaggttgcaaagactgtagatgtggaagagctcactgttgaggagcgcaacctcttgtctgttgcttacaagaatgtgattggtgcccgccgtgcctcctggcgtattgtctcatccattgaacagaaggaggagggtcgtggcaatgaggaacatgttactctgatcaaggagtaccgtggcaagattgaagctgagctgagcaagatttgcgatggtatcctgaagttgcttgactcacaccttgtgccctcatctactgctgcagaatctaaggtgttttacctcaagatgaagggtgattaccacaggtacctt

SEQ ID NO: 41756 - DNA, 424 bp, Oryza sativa
  Clone ID: uC-osroM202040e03b1
gtctttgccacgccgccgccgccgccatggccatcaaaacctagtgccgcctcgcgcagcgcgctgcgtcgtttggatctcgacgacggccggcgccaaggcacggagggagaagaaaaccacgcgcctcttctgtgttctccggcgatggcgagctccacggcatttgcagcggcatttgcgctgctgctgctagcgtcgtcggcggcggcggagggggaggcggtgctgacgctggacgccggcaacttcacggaggtggtgggggcgcacgacttcatcgtcgtcgagttctacgccccatggtgtggccactgcaaccagcttgctccggagtacgaggcggacgccgcctgcctgcgctcgcacgacccgccggtcgtccttgccaaggttgacgccagcgccgacctgaaccggggcc

SEQ ID NO: 41757 - DNA, 529 bp, Oryza sativa
  Clone ID: uC-osroM202040e04b1
ttttcgtcacgcactcacgcttcctccggcggcggcaaggcgacggcatcggcggccaaggcgcgggcggcggcggcggcggcgagcaaggtgcaggcgacgtcatcggcaaccaaggcgcgggcggcggcggcggcggaagcgggaggcggaggagtgggagaggcggaagagggggagcaggaggaggaggctgcagatacgagaggaccccgtggatgtgctcggggaggaggtgatggggcggtttgatgtgatttttttcttccttttctttcactttattcttatatcttcttttatattctcttttcctgtactccattttttattttttctatttttttttttttcttctttccttatcaataattacttttctcttattatctcttagtattttctctttttatcttttctctttctatttatcttcctcttatttttatttttcttacctttttttttcaattttgtcttttctttaccttttttttttatttttttatcttatattttttttcttttc

SEQ ID NO: 41758 - DNA, 179 bp, Oryza sativa
  Clone ID: uC-osroM202040e06b1
accgataaagaacaacatataacttgtgaaccatttatagcacaaaaggttgttgtttaggctgtgaacagacagagcatacggcactattcaaaaggaaacttaccccctcttctcaatagttacaaccattcctcactttattttggaaatactaggaatgagtaacacaataatcc

SEQ ID NO: 41759 - DNA, 456 bp, Oryza sativa
  Clone ID: uC-osroM202040e09b1
tctttttccccaactcggcgtcgcgccgcctcaaccgaagcaaggagcaaagcggggattcagaacgggaaggagaaggtccggttcgtccgctctcgagctcaagtgtcagttgaagtgttttgaaagtcatggcggagcatttggcttcaatatttgggactgagaaggatagggttaactgccccttttacttcaagattggggcttgccgtcatggggatcgttgctcccgtctgcacaacaggccaactgtgtcgccgacaattgtgcttgctaacatgtatcagcgccctgatatgatcacaccaggagtcgatgctcaaggccaacctattgatcctgaaaagatgcaggagcactttgaggatttctatgaggatatctatgaggagctgagcaagtttggtgaggttgagaccctcaatgtctgtgataaccttgctgaccacatga

SEQ ID NO: 41760 - DNA, 529 bp, Oryza sativa
  Clone ID: uC-osroM202040e11b1
tttcgagccaatctctcgctgtgtctctctcgcgctctccactagcaccggctcggctcggctcgcgcggcggcggcggcggggcggcgtggcgccgagggaggggaacgccggtgtggggagggcggcggcgaggggactcgccggcgacgagctggtttgggtatgagaggggttacccatgcggcgccgaccacgagcgtaccccgccgcggctccatggacggccttctcatgttcgtcttgtacctctcgcttactatacgtggtggccgcgaccactcgttaatctcctgctctaattgttagccgatctcgcctctcccccacactctctgatcccgctctctatctctgcttcgattcgattcgatttcgatcttcttcacctcgttgtcgtcgaacgcaactcggatcgggaggataatggaccagccttctaatggcttcacccgcggaggtacttttcttcctcacattgatgggcaaaatgcctttccccttctgtcattgtgattggtggagggat

SEQ ID NO: 41761 - DNA, 282 bp, Oryza sativa
  Clone ID: uC-osroM202040e12b1
gagggagtttagtaatcaccaccgcaccgacccaaaaaccggggggcattttaaaacacattcaccctaactccccctcacatacactcccaaacaatcctactcttcatacaaaatcacaacactctaacaccattaatacaaagaatgagagagaggaagcagattgcagtgagtgagcgagtgagtgaagcagcttatttcagccttataacaggacaaccaacccggcccggcactagcgctgctgctcgcggtggtgggcgtcggcgcgcaagacta

SEQ ID NO: 41762 - DNA, 530 bp, Oryza sativa
  Clone ID: uC-osroM202040f02b1
gtccgctcggcgacgccgcgctgcaggagcgcctcggccagcacctcgacgtcgtcgaggcgcacctcgtgcgggagatcgcgcgccgctccgagtccttctacgaggcgcagggccggctgcgggggctggacggggagatcgtcgccgcggtcgggaggatccgggagctcagggaggtggtccgggtgctcaccggcgatctcgtgggtgccgcgcgccaggtgcaggagctcaatgcgacgcggggtaacctcgtcgcgctgcagcagaagctcaccgtcatcctctacgtcagccaggcgctcgctgctctaaagctgcttgtggcagctgcggattgtgctggtgcccttgacgtaattgatgacctgcaaaacttgctagatactgatgaactcactgggctttattgctttcgaaatattcgtgatcagttggggacatcactagattctgtcaacagcattctttcagcagaatttgtgcgggctgctgttcctgatggaaaagctgtagacgcattgatt

SEQ ID NO: 41763 - DNA, 554 bp, Oryza sativa
  Clone ID: uC-osroM202040f05b1
ctttgcacaaagcctcagtgcctcactgcacttgcaccggtcactaatggctccggctcaatgtgctcgtgtgcagagggtgttccacttcggcaagggcaagagcgagggcaacaaggccatgaaggacctgctgggagggaagggggcgaacttggcggagatggcgagcatcgggctgtcggtgccgccggggttcacggtgtcgacggaggcgtgccagcagtaccaggcggcggggaagacgctgccggcggggctgtgggagggagatcgtcgaggggctccagtggtggaaggagtacatggcggtgcgcctcggtgaccccgtccgccctctcctactgttcgtccgatccggcgccatcgtgctgatgccggggatgatggacacggtgctgaacctggggctgaacgacgaggtggcggcgggactggcggacaagagcggtgaccgctttgcgtacgactactaccgacgttttctcgacatgttctggaacgtggtcatggacaattctcatgcactgttcgaggagaagctcgaagccatg

SEQ ID NO: 41764 - DNA, 499 bp, Oryza sativa
  Clone ID: uC-osroM202040f11b1
aactcaaaactatgttgaacagagcccgagagaatgcatgacaatgttgagtacacaatggcaatgtttttttctttctctggatgacttgccacataagaatttttcggcagtacatgcaacagttttgcagcctacaacagtaagaatgactgacatccatcctaaacagtaaacactatcatatcgacctctgaatctggacccaacaacagttctaaccacaggtggcgatttacacaattttgctgctgggacagacattggacctacagtttataaaactttttatgcgctatacctctgttacatgtataccaatccccctatgctgtgtacatgaatatacatgtacctgcacaaaactcagaacagcaataagtagctcgattgagcttactttgccctagaagctcgacacgaaaaacccagctctcgccggccagctccaacaaagaaaaaaaaccctccatagtccttgtgacagaagcatcccaag

SEQ ID NO: 41765 - DNA, 551 bp, Oryza sativa
  Clone ID: uC-osroM202040g02b1
aaggatgcagggcaactttgcgggtgcagtggaggagtacagcagagccctcagcctgacacccagccacttcaaggcgctgttcaaccgcggcttctcgtatgacaagctgggcaagtatgacttggccatccaggactacaccaaggccctggaggttgaccctgccaacagctttgcatactacaaccgcggtatcaccaaggaccgcatgggtgactttgagggggcagtggcagacttctcgtcagccatctcgctggaccccggcaacgccgacttctatcacaaccgcggcttctcgctgcgcaagcagggccgctttgagtcagccatccgggactacacgcaggccattcagctcaacccaggtcactgccgcgcctactacaaccgcgccttcagccacgaccgcttggggcagtttgaggatgcagttgcagactacagcagggccctgcagatagagccggcgaatgccacagcactgcacaacaggggcagcttgtttgagcggatgggcaggtggaggatgctctgacgacttactg

SEQ ID NO: 41766 - DNA, 553 bp, Oryza sativa
  unsure (1)..(553): unsure at all n locations
  Clone ID: uC-osroM202040g06b1
ctttctcctcctccttcttctccatcgccggcgagagagagagagttagctagctaggatgggttctacagccgccgacatggccgcggcggccgacgaggaggcgtgcatgtacgcgctgcagctggcgtcgtcgtcgatcctgccgatgacgctcaagaacgccatcgagctgggcctgctcgagacgctgcagtccgccgccgtcgccggaggaggggggaaggcggcgctgctgacgccggcggaggtggccgacaagctgccgtccaaggcgaacccggcggcggccgacatggtggaccgcatgctccgcctgctcgcctcctacaacgtcgtcaggtgcgagatgggnngagggcgccgacggcaagctctcccgccgctacgccgncgcgccggtgtgcaagtggctgacgcccaacgaggacggcgtctccatggccgccctcgccctcatgaaccaggacaaggtcctcatggagagctggtactaccttaaggacgcagtcctggacggcggcatcccgttcaacaaggcgtacgggatgac

SEQ ID NO: 41767 - DNA, 490 bp, Oryza sativa
  Clone ID: uC-osroM202040g07b1
ggcgccggccgctccgctgaccatcttctacggtgggaggatggtcgtcttcgaggacttccccgcggacaaggcggcggaggtgatgcgcatggcctcctccgggatggcggcggcgccggctcagctggagggcgccgcgctcgcggacatgcccatcatgaggaaggcgtcgctgcagcggttcttcgccaagcgcaaggaccgcctcgcggcgaccaccccctacgcccgcccgtcgccggcggagaccaaggcctccgagccggaggagaagaagacgcccacctcatggctggacctcgccgtctccgtctccgacgacgcgcgccgtgacagactcaccatcgcgctgtgatctgcgcggctttgaccaaaaacgacttaagacgcgcgcgcgctctcagcgcgcaagaggatcgatttagtttgctcatacggatggcgacgtaaagttcttaccgctcttgctatacttctttgtaaaatt

SEQ ID NO: 41768 - DNA, 557 bp, Oryza sativa
  Clone ID: uC-osroM202040g08b1
attaaaagctcgactcgagctcgccgcgattgaatcgcgcatgggcacggcggcgggcgacgcggcggagcagccaccggcggcgccggaggcgaagagggcggcggctccacggacgctggtgttcacgtacggcacgctgaagaggggcttctccaaccacggcctcctccaggacctggcccgggacggcgacgcctccttcgtgggcgccgccaccaccgcgccgcgcctcccgctcgtctgcgggccctaccgcgtccccttcctcctcaacctccccggcgccggacaccgcgtctccggcgagctctacgccgtcacgccgcgcgggctcgaccgcctcgacgagctggagggcgtctcccgcgcgcactacgagcgcctccccatctccgtcctcctcgccgagggcgcccaggtcgacgccgtcgcctactacgcgcaccgcggctacgccgacgacctgtgggcgcgcagcggcaagaaggggtacccggagtactcgccggccgtcgccgacggctacatccgccgcagggatcggccgcagcagc

SEQ ID NO: 41769 - DNA, 514 bp, Oryza sativa
  Clone ID: uC-osroM202040h05b1
ttgttttggagattaagttacctatactggtttattggaatctgacagtgtctagtggagtaaacagctcaaatacattggattattcggctatgtggtcatctggatatgtaactattgcgtgtagagtcctcttatactcttcatctgtgcatgtatacaagcatccaagaacaatcttttctgattctgaagatgatgatcagagaagatgtggaaattatcaacatcatgcagggtgatctgggaatggaagagaattgtccacgatgagaagcttctcaggatccaggcccccattctcaatgtcaacgatttcgctgtgccagtgtagcctgtctgcagcatccttcaccttgtgaaccacatcaggcgcgtcccggattatcgcagcgcctcctggccggagaatgcgatccatctcgagcatgatgtaagggatgccacacgtgttcatatacaggctgaatactccattggcatgtagcacatcatatgtacgtggataagtaga

SEQ ID NO: 41770 - DNA, 520 bp, Oryza sativa
  unsure (1)..(520): unsure at all n locations
  Clone ID: uC-osroM202040h06b1
ttgttttggagattaagttacctatactggtttattggaatctgacagtgtctagtggagtaaacagctcaaatacattggattattcggctatgtggtcatctggatatgtaactattgcgtgtagagtcctcttatactcttcatctgtgcatgtatacaagcatccaagaacaatcttttctgattctgaagatgatgatcagagaagatgtggaaattatcaacatcatgcagggtgatctgggaatggaagagaattgtccacgatgagaagcttctcaggatccaggcccccattctcaatgtcaacgatttcgctgtgccagtgtagcctgtctgcagcatccttcaccttgtgaaccacatcaggcgcgtnccggattatcgcagcgcctcctggccggagaatgcgatccatctcgagcatgatgtaagggatgccacacgtgtccatatacaggctgaatactccattggcatgtagcacatcatatgtccgtggataagtagagaaaga

SEQ ID NO: 41771 - DNA, 522 bp, Oryza sativa
  Clone ID: uC-osroM202040h10b1
tgttgagcagaggaggacgaagcagcaggcgggggcggcagagcacggcgacctagcccgacctcgcaaccatggcaaggggtttgaagaagcatctgaagaggctcaatgcgcccaagcattggatgctcgacaagcttggtggagcttttgcccccaagccatcttctggtcctcacaagtccagggagtgcctgcctctgatcctcattatcaggaacaggctcaagtatgctctgacataccgtgaggttatttctatcctcatgcagcgccatgtcttggttgatggcaaggtcaggactgacaagacctacccagctggtttcatggatgtcatttccatccccaagactggtgagaactacaggcttctgtacgacaccaagggacgtttccgccttcagtctgtcaaggatgaggatgctaagttcaagctttgcaaggttcggtctgtgcagtttgccagaagggaatcccctacctgaacacctatgatggtcgcaccatccgctaccctga

SEQ ID NO: 41772 - DNA, 534 bp, Oryza sativa
  Clone ID: uC-osroM202040h11b1
tttatagacccacccctgcacatacagcaaggacaaggagtgtaagcctgctctgttcaatgccctgttcagcaccgtctccttcctgcttggagccatcacctcagtggtttctggcttcctcgggatgaagattgcgacttacgcaaatgcgcggaccaccctggaggcgaggaagggtgttggcaaggccttcatcaccgcgttccgttcgggagcggcgatgggattcttgctggcatcaaatgggcttctggtgctttacattgccataaacttgttcaagatgtactatggcgatgattgggagggtctctttgagtccatcactggctatggccttggtggatcctcaatggctctgtttggaagggtggtggagagggtatctacaccaaggcggctgacgtcggtgctgatcttgttggcaaagttgaaaggaacatccctgaagatgatcctcggaaccctgctgtgattgctgtcactgttggaaacaacgttgggtgatattgcttgtaatgggatccgatc

SEQ ID NO: 41773 - DNA, 206 bp, Oryza sativa
  Clone ID: uC-osroM202040h12b1
tacttttttttttcttcggtggtgttgggagtggacaaggtagagtgagtcactattaacccccatgaacagcccagagcacacttctagtaaacatcacaaccctagtcgattcttgcgctgaccccacaattggatataacacaattgagcgtacaaccctcttatacaataacacttgttcatatatacaaccattcaaaaac

SEQ ID NO: 41774 - DNA, 296 bp, Oryza sativa
  Clone ID: uC-osroM202041a01b1
ctagctgaccactctactatacacacacatatatacttttttcttggtgtattagtaagcacaccttatcgacatcaatggccaaccgagaggatgagaccccgaccaccgtgccggccgaggaggcgccagtggaggcgacgccggcggccgccgccgccgaggtggaagcgcccaaggaggagacgccggcggcgccggccgaggctgtggccgaggaggcggcgcccgccgaggccgaggtggcggagaccaaggaggccgagccagctgcggccgaacccgctgcggaagag

SEQ ID NO: 41775 - DNA, 220 bp, Oryza sativa
  Clone ID: uC-osroM202041a05b1
cttcttttttttttttttttaggttcaaatccaacttattcataaagcatactgctgtcccacaggacactgttttataaaactaacatagcatacggacttggttgtccattaaaccagacacaaggagacattagcaccacaaatacttgacgtacagagggtcgggcctgccaggcacatcgtcagctccaccaaactggctgattactgaccacca

SEQ ID NO: 41776 - DNA, 305 bp, Oryza sativa
  Clone ID: uC-osroM202041a11b1
tgttatagctgactcaaaacttcagccacaggggctgcgcagggtgccgaagggcgcggaagggctatgcccaggactactctatgtatggacacgatgctaaactagctgaagagatcaagaagggtgctgcatctaacgaaggagctgaggctaaaacagggcagggtcctgcagctgttcatgaggaagtactagggaaggaggtcgcgcctcctaagccagaggcgctagctaccacaccacatgaacttactgtggctgatggaaaactgcttgctgtccctacaagggtcggcatgaag

SEQ ID NO: 41777 - DNA, 361 bp, Oryza sativa
  Clone ID: uC-osroM202041a12b1
aaaaaacaaggaaacatttttatttcgagggaaggacgcaggactgaagaaacttaaaagtgtccctgatgtgtttcatcatccgttctgtcactcacaaatggactcaaaatacagacccagatcaagtgtggtgttcaaccaaaatgttaactggcgaatggaaggtggcgtggttttctagaaactgcagatttgtacagaccaatccccagacagaagaaatacaagatcaagactggtgggcagcaaacaaattttgctgggatttatttgccccgattcatcgtccaagttcttcataccttcagggccaacttcttagcagcaagaacctccgcttcgagggttggctcccaaa

SEQ ID NO: 41778 - DNA, 383 bp, Oryza sativa
  Clone ID: uC-osroM202041b04b1
ggagatcgcgatggtgctgaagcaggggctggagaagacggggcggttcaacatcgtgtccaaggacaacggcgtgccgctggtggccttctccctcaaggacagcgcccggcacaacgagttcgagatctccgacttcctccgccgcttcggctggatcgtgccggcctacaccatgccccccgacgcgcagcacgtcaccgtgctccgcgtcgtcatccgcgaggacttcagccgcacgctcgccgagcgcctcgtgctcgacgtcgagaaggtgctgcacgagctcgacgcgctccccgcccgcgtcgtcgtcaacggcggcgacgccgccgccgcgtcggcgagcgagagggagatggagagcatcgcgaggtgatctc

SEQ ID NO: 41779 - DNA, 461 bp, Oryza sativa
  unsure (1)..(461): unsure at all n locations
  Clone ID: uC-osroM202041b10b1
taaatatttttcggcttattcgttgctcatagaacacatcaccgcgacaaaaaataagcctctcttgttgtcacctccacacgtccatttgtcaccgctgatgagctttcgtgtgcgccagctgcacaaagaaagaccggtccataagagcggctgcctggttctgaatttctagtcgccacagcggagaggagccgatacttccatggccatgaagaagcttgtgctgaagctggacctgcacgatgacaaggataagcagaaggcgatcaaagccgtctccaccctccacgggatcgacatgatctccatggacatgaagggccaaaagctgacggtggtcggcgacgtcgacccggtggacgtcgtcggcaagctccggaagggctggccgtcggcgagcctcctctccgtggngccggcgacggaggagaagaaggaggagaagagcccggagagaa

SEQ ID NO: 41780 - DNA, 409 bp, Oryza sativa
  unsure (1)..(409): unsure at all n locations
  Clone ID: uC-osroM202041b11b1
taacaatggagggtgtcggtggcggcaagcgccgcggggacgacggggcggaggccacgccgcggtggcgcttctcccggccgtcgtcgcagggcgggcccctggcggccgccggcctcacgagcatccgcgcggtgctcaaccgcgtcaactcctccgtcgacgccgccgccgccggcgggccgcgccccgtcctgcggctcggcaacggcgaccccaccgcgtccgcctgctaccgcaccgcgcccgccgccgaggacgccgtcgtcgacgcgctccgctccggggcgcacaacggctactccctaaccgtcggcgtactctcggcgcgccgtgctattgcagaatacctatctcgagatcttccttatgagctttcggcanatgatatttaccctgacctccggat

SEQ ID NO: 41781 - DNA, 470 bp, Oryza sativa
  Clone ID: uC-osroM202041b12b1
aagttggtcatcgtgctcgagctgaatctaaacctttgcaacaatggcggcgcgtgttgttgtggcgttcgcggttgcgtccgccatgttcgtggccgtctccggccagaagttcaacgccatcttcagcttcggcgactccatgtccgacaccggcaacctctgcgtgaacggcccccccgccggcctgacgctcacccagcctccctacggcgagaccttcttcggccgcgccacctgccgctgctccgacggccgcctcgtcgtcgacttcctcgcggagaagttcgggctgccgttgctgccgccgtcgaagaggggcggctccgacttccggcgaggcgcgaacatggcgatcatcggcgccaccaccatggactccggcttcttccagtcgctcggcatcggcgacaagatctggaacaatggccccctcaacacccagatccagtggttccagcagctcatgc

SEQ ID NO: 41782 - DNA, 310 bp, Oryza sativa
  Clone ID: uC-osroM202041c02b1
gagcgatccttgcggtgctcataccgagcgcgccggcggcgaggcgcgtcacggcgggccacgtctggccgggcgacgccaacaaggccaagaagaagggcgcgcgcgccgacgacttcgaggccgcgttccgcgacttcgacaacgactccgatgacgaggagatgatggtggaggaggcggaggaggaggaggcgacctccgagcacaagccgttcgtcttccgcgccaagaaggcggcggcggtggcgtctagcaggcgcaggaagccggcgcagtacaggggcgtgcggcgccgttcgtgggggaa

SEQ ID NO: 41783 - DNA, 123 bp, Oryza sativa
  Clone ID: uC-osroM202041c03b1
gctgatcgtctgatcggacgggcgcgacagcgtgatggtgaaggtgacggtgccggcgccctcgttgaccgtctggtcgggcaggggctggatgaccggcagcccgatcgcgatgtcgccgat

SEQ ID NO: 41784 - DNA, 268 bp, Oryza sativa
  Clone ID: uC-osroM202041c04b1
ccctggcctcgtcgctgcccgccctcgacgacgttttcttggagaggagaaatccgtaggctccagaggatttttggtcggctaggttcgcgatcttctggaacagggggggagctactgcgtggattcctaggatcagaatggcaacactgcggggctcgctagctatctgagcttgcaaacacaggttgtgagtggaatctaagctgactgtcctaatggagacacgggttggcaacactaacagtagcaacctctggtcgttgat

SEQ ID NO: 41785 - DNA, 378 bp, Oryza sativa
  Clone ID: uC-osroM202041c05b1
aaatgctcctcctccgccgcctcctctcgctgagctgagctgagctgtgaaatagtgccaccgagtgagcgctgagctgagctcgaagcaagagaggaagaggaggaggagggaagagggggggcgaagatgattacggcggcggacttctaccacgtgatgacggcgatggtgccgttgtacgtggcgatgatactggcgtacgggtcggtgaagtggtggcgcatcttcacgccggaccagtgctccgggatcaaccgcttcgtggcgctcttcgccgagccgctgctgtcgtttcactttatctacaccaacaacccgtacacgatgaaccttcggttcatcgccgccgacacgctgcagaagctgatggtgctg

SEQ ID NO: 41786 - DNA, 446 bp, Oryza sativa
  Clone ID: uC-osroM202041c08b1
gcaattaagtggtaatttcatatccctgcagatctctcttccatctatctgaatatctcttgtgtagaagagaaattaacaaaccctgcatatgtatatgcaactatgcaagatctgatcccaaaatctaattaacaatttaccaatccatggccgtagctagcctcaactgatcacacatggaaccgtgtgaaaaccacaaaacaaacaaaatgaagatggcaaaaaaacacggatctatgtaatattccatggatctacaactacctaggctacatacatatatatatgccaatccacactgtttaatttaactttggcgtttgatgatgatgagcgatgcgtgcatgcatgcagttgatcatgaacgcagcggcagattcatctctcgaccatgttagtataggagtacacaacactagctggtggcggccactggagtgcgt

SEQ ID NO: 41787 - DNA, 489 bp, Oryza sativa
  Clone ID: uC-osroM202041c10b1
gctcagtatgtcaagtataaggatccgaagcagcccgtctctgttcgtgtcaaggatctgctcggccggatgactctcgctgagaagattggccagatgacccaaatcgagagggagaatgccacggcggagcagattgccaagtacttcataggtagtgtactgagtggtggaggcagcgtgcctgctcctcaggcatcagctcaggcttgggcttcaatggtgaatgaaatgcaaaagggtgccctttcgacccgactaggtattccgatgatctacggtattgatgccgtgcatgggcacaataacgtctacaaggctacaatcttcccccataatgtcgggctcggcgctaccagggaccccgacctagtaaagaggataggagaagcaactgctcttgaagttagagctactggaattccctacgtctatgctccttgcgttgcggtttgcagagacccaagatggggacgctgctacgaaagc

SEQ ID NO: 41788 - DNA, 507 bp, Oryza sativa
  unsure (1)..(507): unsure at all n locations
  Clone ID: uC-osroM202041c11b1
aagttggtcatcgagctcgagctgaatctaaacctttgcaacaatggcggcgcgtgttgttgtggcgttcgcggttgcgtccgccatgttcgtggccgtctccggccagaagttcaacgccatcttcagcttcggcgactccatgtccgacaccggcaacctctgcgtgaacggcccccccgccggcctgacgctcacccagcctccctacggcgagaccttcttcggccgcgccacctgccgctgctccgacggccgcctcgtcgtcgacttcctcgcggagaagttcgggctgccgttgctgccgccgtcgaagaggggcggctccgacttccggcgaggcgcgaacatggcgatcatcggcgccaccaccatggactccggcttcttccagtcgctcggcatcggcgacaagatctggaacaatggccccctcaacacccagatccagtggttccagcagctcatgccctncatctgcngctcatcttgcangacgtacctgtc

SEQ ID NO: 41789 - DNA, 362 bp, Oryza sativa
  Clone ID: uC-osroM202041c12b1
gctctagctggctagcggccgccgtaacaatggcggcgcgtgttgttgtggcgttcgcggttgcgtccgccatgttcgtggccgtctccggccagaagttcaacgccaggttcagcttcggcgactccatgtccgacaccggcaacctatgcgtgaacggcccccccgtcggcctgacgctcacccagcctccctacggggagaccttcttcggccgtgccacctgtcgatgatgcgacggccgcctcgtcgtcgactttctcgcggagaagttcgggctgccgttgctgccgccgacgaagaggggcggttccgactttcggcgaggcgcgaacatggcgatcatcaacgccaccaccatg

SEQ ID NO: 41790 - DNA, 482 bp, Oryza sativa
  unsure (1)..(482): unsure at all n locations
  Clone ID: uC-osroM202041d02b1
cgtgttccatgaagctccagtacctccgcctcggcgccgtgcccgccgtcgtggcggcgctcgcggggcccggggcctcccccgccgcgctcgtgcaggccgccgccgccgttgggagcttcgcgtgcggcgtcgacgacggcgtgcgggccgtgctcgccgccggggccgtggcccacctgacgcggctcctcgcccaccccgacgagaaggctgttgatgctagtgcacgtgctctgagaatgatttatcaatcgaaactagctccaaagtttgatgtcaacaataatgagaaaaacatggaatttcttcttacccttttgaacagcgagaatgaaaatgtcacagagcttgctgccaatattatatctcactcttgtgatagcactacagaacaattagcactatgtgctgctggagttccgcagagacttgttaaccattttggaggctccatgaatctacnggatgcttgcttagat

SEQ ID NO: 41791 - DNA, 418 bp, Oryza sativa
  Clone ID: uC-osroM202041d06b1
cacaaaccattgcaactgcactacactgcagcacacacaccccgcacccaccaagctaagtaattaatcatcaatggcttccgccgtggtgaagatggccgtcgtctgcctgctcctcctgtccgccggtcatctgatggcctccgccgccgccgcgcgcccggacaccgtcgacgacgcggcggcgctgctgcgcctcaaggaccgcatcgagctgcaggaggaggaggccctggccctcgccgaggagctcgccctcctcgacgacggcgccggcgacgccgtcggagccggctgctcctgcagcaccaccaagtgcaagacgtgcatcgccacctgcgggatcaagtgcttccccaagggaatcaaaggcttccccacctgcttcttcgcctgcgtcttcaccaccagcaagtgc

SEQ ID NO: 41792 - DNA, 444 bp, Oryza sativa
  Clone ID: uC-osroM202041d07b1
gcaattaagtggtaatttcatatccctgcagatctctcttccatctatctgaatatctcttgtgtagaagagaaattaacaaaccctgcatatgtatatgcaactatgcaagatctgatcccaaaatctaattaacaatttaccaatccatggccgtagctagcctcaactgatcacacatggaaccgtgtgaaaaccacaaaacaaacaaaatgaagatggcaaaaaaacacggatctatgtaatattccatggatctacaactacctaggctacatacatatatatatgccaatccacactgtttaatttaactttggcgtttgatgatgatgagcgatgcgtgcatgcatgcagttgatcatgaacgcagcggcagattcatctctcgaccatgttagtataggagtacacaacactagctggtggcggccactggagtgc

SEQ ID NO: 41793 - DNA, 252 bp, Oryza sativa
  Clone ID: uC-osroM202041e02b1
ggttgttggtttttttttttgtgtgagagggtttttgctcgcttgaatggtaggctcgatttaatgaggagggggccaaaaaaaaggaacccaagggagtcgagggggcaaaagagaaagaagcccgtgggcgaaaggaaggaattgggggaaagggaaccgacgattggcacacacttggggcggaaagagcaaacaaaggtaattgatccgccgggagtgaggagaacaaatccagccaagtacccgggg

SEQ ID NO: 41794 - DNA, 262 bp, Oryza sativa
  Clone ID: uC-osroM202041e10b1
catcgccattgattcttcactcgaagcttagctacacagagagaagcatctagtagtagtcgcatgggcaacagcttgcagctgccatgtccgtgccaggaggccacggcggtggccacctcgggagtcaagaagaggaggaagaagtcgccggccaccgccgctgtcaggagcagcaaggcggcggcggcggcgtcgtcgaggcacgtggttccggtgatagacacgccgggggaggaggaggagatgaggatggtgcgct

SEQ ID NO: 41795 - DNA, 477 bp, Oryza sativa
  unsure (1)..(477): unsure at all n locations
  Clone ID: uC-osroM202041e11b1
tattcgatttgttcgttcggttactgcaaaagaaagtcagcaacaaaatggccaacgcgaggaacgcggctgccgcgtcgccgccgccgccgtcgtcgtcttcttcgtattcctcgtcggcgtccgacggggagatcctccgatcgctgcaccgcctggcgagggatctggctgcggcggaggcgccggcgccgttcttggagacggtgttcgcggcggtgtccaggcgcgcgaagcttctcgccgcggtgttcgacgacctgctccggtgcgggaggctgccgcggtcggcgtcgctgtgcctgcgcgaggtgctgctcgtgctgcagcggttcaaggcggtggtggccgactgctcggcgcgcagccggatgcggctgctactgcaggccgacgaggtggcggcgcggctgcgtgagctgcagcatgacctggccacgctgctggatcttctncccgttcccgagctcgggctcg

SEQ ID NO: 41796 - DNA, 463 bp, Oryza sativa
  Clone ID: uC-osroM202041e12b1
ctcctatctatcccgcacctcgaggccggtgaattcttagcctacgccgcgaccgagcccctgtcgctctatggggctccggtggctgatccagcgcattcttctcgccgctcgcccgccggcgggaggacacggggcactgtcgcggaggggggatgcacatacgaggcgcaacgcgttggactagtggggcataccagaacccttgctccactggacgaggttgcggagcacgcaaggaaccgggccgcatatgcaagtgtgggtgaagtcatatgtgccaacccatcgaggattcttagaggtgacaccatagcaggtggaacacttagaaacttacatgagaggtatcagtcaagctatgtgtgcagctttgcacgcaagatgcgacagatggactcacccagtgaagcctttctgctgcaagaagtatataggagtgatccagagcgagttatacaga

SEQ ID NO: 41797 - DNA, 396 bp, Oryza sativa
  Clone ID: uC-osroM202041f01b1
cattaatgatttctttttacattggtgggcaccctcgactgggccccctgagggagctcatgctcgcccttgcgtcgttccgcgagggcaagagcagccacgaggacaaggagaaggatgcgaccgaccgcaggggcagcatcaggaagaacaaggcagaccctgggaacaagaacatccccagcaacaccgccccggactatgaagagggggccgaccccgctgccaggcacggggcggcgccagagcgcgacacacggaccggtggagagaccggcgccagcacccacccggcgatggcgaggcgccggggcaacagagccccgcccaggaggagaccaagaggtgggacaccaacaacgcacccaaccgtgcttcaacctgggcccaacacca

SEQ ID NO: 41798 - DNA, 293 bp, Oryza sativa
  Clone ID: uC-osroM202041f02b1
aaggtctatcaaccatatagtcttgtttctgaccaccagatcaatgcccaaacatggctgagaaggtatgagcatgactgtgttgggagttttgctttctgagtatttgtcgtactgcactaggcctcttcagcgaagtctgctgaaggctactcagtttgttctagtatgttatgatgggtgtctttttagccctcatgctcttctcctttgtagaatatggctagattgctttttctagaatttgtactgtgttgaattaaccagaaataaattgtctgaattactattcc

SEQ ID NO: 41799 - DNA, 485 bp, Oryza sativa
  Clone ID: uC-osroM202041f05b1
tcactgaggaagaagagcatagcaaaagagtggtcgatcgtcatcaatggagcacgacggcacggcggcgctcggctgggcggcgcgggacgcctccggccacctctcaccgttcagcttcacaagaagggttcaggaggaagacgacgtgacgatcaaggtgctctactgcggcatctgtcacaccgacctgcacaccatcaagaacgagtggggcaacgccatgtaccccgtcgtccccggccacgagatcgtcggcgtcgtcgccggcgtcggcgccggcgtgaccaggttcaaggccggcgacacggtgggcgtgggctacttcgtcgactcgtgccgcgcctgcgacagctgcggcaagggggacgagaactactgcccgacgatggtgatcacgtcgaacggcacggactacggcggcgccaccacccagggcggtttctccgacgtcatggtcgtgaggcaggactacgtgttgcgcg

SEQ ID NO: 41800 - DNA, 370 bp, Oryza sativa
  Clone ID: uC-osroM202041f06b1
gtgaaaggggacaaacatcatacatgtggacgggccaaatgtttcaataccactatagactggcgtgcataaatacaatcgatcacaacgctgcaggtgaactgctgaataagaggagtgcagaggctatatatggcaggctgacacatgacttcttgagcatgtccagagagggggacttttccaagctggatagtgcgatcctgaggccaataaacagacagtttgagggaggaatctaccatggaaggatccagatgtcattgtactatgccgttaagacaccataacttatgctgctcactccaggtgtaagatgtgagattcaaaagaagatctgattgagcatatacaattaccacgctgagca

SEQ ID NO: 41801 - DNA, 306 bp, Oryza sativa
  Clone ID: uC-osroM202041f07b1
tttttattttttttttttgtttaattattattataaaaaatataattttttttttttattttattaataatattttttaaaaaaaaaaatattaaaaaaaaagaaaaaaacaagaaacaaataaaaaaaaaaaaaaaaaaaaaaaaaaaagaaaaaaaaagaagaataagaaaaaaaaaggaaaaaaaatgaaacaaaaaaacaaaaacattgacaccagggctctgagcacaaaacgaaaaaaattaaaaacgatcccgatactggacgctgcaccagaaaaaaaaaacgacgaaaggtcggcaa

SEQ ID NO: 41802 - DNA, 485 bp, Oryza sativa
  Clone ID: uC-osroM202041f08b1
ggcatctcaacgccggaatcttcggcactggctccgatggccacacgctgccgtcggagacggtgcgggcggccatgctcgtgcgcatcaacaccctcctccagggctactccggcatccggttcgagatcctcgaggccatcaccaagctgctcaacaccggcgtcacgccgtgcctgccgctccgtggcaccatcaccgcgtccggtgacctggttcccctgtcctacattgccggcctcatcaccggccgccccaacgcgcaggccatctcgcccgacggcaggaaggtggacgccgccgaggcgttcaagctcgccggcatcgagggtggcttcttcacgctgaaccccaaggaaggtctcgccatcgtcaatggcacgtccgtggggtcggcgctcgcggccaccgtgatgttcgacgccaacatcctcgccgtcctgtccgaggtgctctcggcggtgttctgcgaggtgatgaacggc

SEQ ID NO: 41803 - DNA, 390 bp, Oryza sativa
  unsure (1)..(390): unsure at all n locations
  Clone ID: uC-osroM202041g09b1
tccggtattcccgggtttttttttttttcttttttttaaancccacattcatccaacacaacaatattaaacaaaaatggtaactttggtagctatcgccgattgctctataagttgacaactgatatgttcaagtttcaacagggtgcacaaagggcaaaaacaacgatgttaagtgtctatggttggacaacttaaggtactatatcaatcatcactgccagaatctatatgggagtttgccttttggtgggctactccgttcgggaccttaccctttactgtgctgtttttatcctcctggtgattggtgtacttgttctcgcagtcgaagtactcctatcgttccttcctttgtttttccttaataccatgctttgcctctgggtc

SEQ ID NO: 41804 - DNA, 484 bp, Oryza sativa
  Clone ID: uC-osroM202041g10b1
gcgtagtgcttagtctagatgaacagaacaatatgctggacacatggaggcaagtaactaagaatacaatgtttgatgaatggttaaatgaatgggggaagagatcacctacttcttctggcccttcaagcgatgcctcccatccagatgaagatcatttccaggaaaagttcgatcagagtgaacagatgtttaagcctggctggaaggacatctttcgaatgaaccagagtgagcttgaggctgacatacgaaaggtttctcgtgattctactgttgacccaaggaggaaggtttatctaattcaaaatctcatgaccagccgctggatagctgctcagcatagaatcgcccaacctcagtcagaagagcgtaatggatgtacagtattacctggatgatggccttcataccgagatccagagactcagatttttggctgtgagcattacaagaggaaatgcaaacttgctgctgcatgctg

SEQ ID NO: 41805 - DNA, 456 bp, Oryza sativa
  Clone ID: uC-osroM202041h06b1
agttttagagcaaccatggccgcgcgcgtgctccccctcctcctcgtcgtcgtcgtcgccgcggccatggcgagagcccccacggcccacgcgtggggcaaggagggccactacatggtgtgcaagatcgccgagggtttcctgacgaaggaggcggcgacggcggtgaaggagctcctccccgggtgggccggcggcgagctcgcggaaacgtgctcgtgggcggacaccgagcggttccggtaccggtggtcgagccccctccacttcgccgacacccccggcgactgccagttcaactacgcccgggattgccacaacacaaacggtgagaaggacatgtgtgtggtcggagcgatcaacaactacaccaacgcgctcgaggactcatcaagtccatatgatccaaccgagagcttgatgttcttggcacacttcgtcggcgacgtttaccag

SEQ ID NO: 41806 - DNA, 498 bp, Oryza sativa
  Clone ID: uC-osroM202041h09b1
agattgccaggttcttatgatgcgattagaatccgatctagcacaagttctgatgtctgcatgcagaggagaacttggcaatgtttcactaacctggtcacctgaaatggcgatggtggttgtgatggcaagcgaaggataccccggatcttataagaaggggactgtaataagaaatctcgagaaggccgagcaggtctcgcccgcggtaaaaatattccatgctggaacagcactggatggggatggaaatcttgtcgctgtcggaggccgggtgctcgggatcacggctaagggcaaagatattgaggaagcaagggcaagagcatatgatgcagtagatgttgttgactggcctgcaggattcttcaggcgcgatattggttggagagcactgaagcacaaacaagtggccaattactgatgcggattttcctgagcacaccacaactatggtgagcatgtaatcttaagagcaataaaaagaaaatttgtcac

SEQ ID NO: 41807 - DNA, 414 bp, Oryza sativa
  Clone ID: uC-osroM202001a03b1
cttcttcctcctcgaaatcgtttgtgagggtttcgatctcgaaaccgacaagggttcgccccgcgagtgcatggcagtgcgcctactggctaatgaggtgtcggacctgtgcatcggcaagccggcggtgaggtcgctcccgctctccgccgccgccggggacctggccgcggcgctcaggaggggaccgcatcaggcagcgggaggggcggccgcgtgcgtcgccgtcgacggccccgggcgcgccgtcgcggggaggctcgggctcgccgacgtgctctgcttcctctgcgccgcgccgggcgcgctcgcccaccccaccgtcgcgctctccaagcccgtctccgcgctcctccccaaggacggcgccggctaggtccgccgcgtcgacccccgcgccagtgtgttggaggc

SEQ ID NO: 41808 - DNA, 445 bp, Oryza sativa
  Clone ID: uC-osroM202001a05b1
ctgcggtgcagcaacagcaggcgagcgacatgggagggtttgtcaagacccagaagacccatgcctacttcaagcgtttccaagtcaagttcaagagacggaggcagggcaagactgactacagggccaggattaggctcaccaaccaagataagaacaagtacaacacaccgaagtaccgctttgttgtgagatttacaaacaaagatatcacagctcaaattgtctatgctaccattgcgggtgatatcgtgatggctgctgcctactcccatgagctgcctcgttatggtcttgaagttggtctcaccaactatgcggcagcttactgcactggcttgcttctggctcgccgtgtgctcacgctccgtggtttggaccaggagtacgagggcaatgttgaggccactggggaggactactatgttgaaccagctgatgaaag

SEQ ID NO: 41809 - DNA, 428 bp, Oryza sativa
  Clone ID: uC-osroM202001a06b1
cttgctagtgcttcagatcttcttcttcgagcaactgatggaatgcttgttgatggtgaagcttgtactttaccacaattagagctattggaagtaaccgccagagcagctcatctcatcgtcgaatggggagattcaggtgtatccgtcgctgagggcctatccaatctgctgaagtgccgtctatcaaccaccatgcggtgtttgtcgtaccccagcgcgcatgtccgtgcactcagcatgtacgtgcttagcgacatcttgaacagcggacaaataaactccagtaagctcatccaaggggaacaccggaatggcatccagagcccaacctaccagtgcttggcagctagcatcatcaactggcaagccgatgtggagagatgcatagagtgagaagcccacagacgccgcgccaccggactgac

SEQ ID NO: 41810 - DNA, 441 bp, Oryza sativa
  unsure (1)..(441): unsure at all n locations
  Clone ID: uC-osroM202001a07b1
atccggctaaccccacctgcccccgtccgtccgcccgcccgcccgcctcggcgacttcacgcgtacaagggggatttgttttctctagggtttcgttcgcgaggaggagagatctggttggggagatggacgggaagccgccgccgccgaacccgaacctgccctaccgggaggactgctggagcgacggcgagacggcggcgctcgtcgacgcctgggggaggcgctacgtcgacctcaaccgcgggagcctccgccagccgcagtggcgggaggtggccgaggccgtcaacgcgcggccgggggcgtccgcgcgccgccggccgccgcgcaccgacatccagtgcaagaaccgcgtcgacaccctcaagaagaagtacaaggcggagcgcgcgcggnggacgccctcgtcctggtacttctacagggacctcgacatgc

SEQ ID NO: 41811 - DNA, 534 bp, Oryza sativa
  unsure (1)..(534): unsure at all n locations
  Clone ID: uC-osroM202001a08b1
tcgctgcgagtgattcaagaaaaaagaaaacctgagctttcgatctcttcggagtggtttcttgttctttgaaaaagagggggattaatggcgacagccgggaaggtgatcaagtgcaaagcggcggtggcatgggaggccgggaagccgctgtcgatcgaggaggtggaggttgcgccgccgcaggccatggaggtccgcgtcaagatcctctacaccgccctctgccacaccgacgtctacttctgggaggccaaggggcaaacacctgttttccctaggatcttgggccatgaagctggaggcattgtggagagtgtgggagagggtgtgaccgaactcgcgccgggcgaccatgtcctcccggtgttcaccggcgagtgcaaggagtgtgatcactgcaaatcggaggagagcaacatgtgtgacctcctcaggatcaacgtcgaccgcggcgtcatgatcggcgacggcaagtcccactcaccatcaaggggaagcccatcttccacttntgtggcacatccaccttca

SEQ ID NO: 41812 - DNA, 499 bp, Oryza sativa
  Clone ID: uC-osroM202001a09b1
tcgctaaggcagtgatcacagtcccagcatatttcaatgactcacaaaggacagcaacaaaagatgctggccggattgctgggttggaagttctccgcatcataaacgagcctactgcagcatctttggcatatgggtttgaaaagaagaacaatgagaccattcttgtttttgacctgggaggaggcacatttgatgtttcagttcttgaagttggtgatggtgtttttgaggtgctgtctacatctggtgacactcaccttggtggtgatgactttgacaagagggttgttgattggctggcggggaacttcaagaatgatgaaggtattgacctactaaaagacaagcaggccttgcaacgtcttacagaagcagctgagaaggcaaagatggagctatcatccttgacccaaacaaatatcagtttacccttcattacagctactgctgatgggcccaagcatatcgagacaactcttaccagggctaaatttga

SEQ ID NO: 41813 - DNA, 490 bp, Oryza sativa
  unsure (1)..(490): unsure at all n locations
  Clone ID: uC-osroM202001a10b1
tcggttagatgttgagagacaaactacaaaaccaattggtgttatggctccgcaggatacatggtgtaggatggatcccaaatcccttcaacagagcgaagtcgatgggcacgaagggtgcagccaaaatatgttgggttatctgcatcttgcttcccctgcaataaataaatacgacagtcgctccctagattttgttccaccccatctcaagattcctgcaggacccatagaagaatcagtaagagggagagggactatcgatcatgtgacgaacaagaaagatgtggagagacaaactacaaaaccaattggtgttatggctccgcaggatacatggtgagggnggggatcccaaatcccttcaacagagcgaagtcgatgggcacgaagggcgcagccctaaagactcaatatacaccaactgcactatcccccatcgatactccctaccttcgaaggatgataaagatcaatgtgaatatccatg

SEQ ID NO: 41814 - DNA, 382 bp, Oryza sativa
  Clone ID: uC-osroM202001a11b1
ttgatttttaatagcgggaagacccaaaccagctcgccctacattgaccaaatcggatcgggccaaatcctcctccccttcgtcgccgctgctgtaggctacccaaatctcgccgctgctgttggctactcaaatctcgccgctgctgtaggctacccaatcgctgcaccatgtgtggtgactgctgcggccgcggtgccgggggagcctgccgaggcgggggcggccggcgccggcagcaggaggaagcggaggtgctcggggacggcgctcgccctcgtggcgctggcggccgccgcggaggtcgccgtcctggagggcaccgccggaggtgtcttctacgtgggcgactggtggctccacgagtgcgccaagtgggaac

SEQ ID NO: 41815 - DNA, 480 bp, Oryza sativa
  Clone ID: uC-osroM202001a12b1
attgcgccccttatgcattagagcccccggagtcccctctgtttcgcagataagtcctttggttcccatctttttattacattcaggtcctcctagtttcttttccttacgagactactccttgcattcttgcgaggaagcccctcgggttggtcgaattttagttgccactccctctcctcgcggagtcgttgctgtgcttgttcttggtcaaggttgaggttggtggcgtagatccgatctgcggaatgacaacctatcctttgctctaacgatcgccgtactgcgatgaagttgaacgtgctccgccgccgtcgttcccactccttctccgtcgccttcctctactggtactacgtgttctcatgaactcatgcgcttcctcccaagaacaccatctccagcctctaattgattatatcttgatttctttttcatcctcctactagtttctttcttgggttcttgggaatttttttg

SEQ ID NO: 41816 - DNA, 495 bp, Oryza sativa
  Clone ID: uC-osroM202001b02b1
gtttggttggatccgaggagtttgcggttcagatcttctactcgcttgcgcggcggcgagggatcacggctcagttgctgaccaaggatcagctccgggagttttgggagcagctctctgatccaggatttgatgccaagctgcagactttctttgacatggttgacaagaatgcagatggtcagatcactgaagaggagctcaaagaggtcctcaccctgactgcctctgcaaacaagctgtccaagatcctggagcgcgtcgacgagtacaccgcgctgatcatggaggagctcgatcccgatcaattaggctacatagatatatcaaacctggagtcgctgctgctgctgccgccgtcgcaggcgccgtcgaagctggtgacgcacagctccaacatcagccagctgatcagccagaagctggtgccgacgcacgaccggaacccgctccggcgggggcttctgcggctgttctacttcatggaggacaact

SEQ ID NO: 41817 - DNA, 476 bp, Oryza sativa
  Clone ID: uC-osroM202001b03b1
ctggaattccagggcatcaaaaagcaatttactatgctccagacatggcctgtccggtcaccaaggcctgtttcatcaaagcttgctgctgacacgcctcttctaacaggacagcgtgtacttgatgcactatttccctcagttcttggaggaacttgtgctattcctggagcatttggttgtggaaaaactgtcattagtcaggcactttcaaagtactccaattctgaagctgtggtttatgtgggctgcggggaaagaggaaacgagatggctgaggtccttatggacttcccacaattgacaatgacattgcctgatggacgtgaagagtctgtcatgaaaagaactacacttgttgctaacacatccaacatgcctgttgctgctcgtgaagcctccatttatacaggaattacaattgctgaatacttccgtgacatgggctataatgtcagtatgatggctgattctac

SEQ ID NO: 41818 - DNA, 459 bp, Oryza sativa
  Clone ID: uC-osroM202001b06b1
ctttaaccagaaccccaaactcaagtcgagcaggaagtcaaattgtaagtgacggaagaggtgaagaaagaggaggaagatttcgtggtcaatccctatacgatttccagcagcaccaacaaagaaattgattacaacaagctaatcgagaagtttggatgttatcatatcacagaggagcagatccaaagaatagagaagtataccaaacagccagcgcattacttcatcagaagaggcatcttcttctcccatagagatctcgatgccatcctcactgcctgcgaaacacacaaagatccaactatcccgcctttttacctctacacgggaagaggaccgtcctcggaagcactccatctcggccacatgctgcctttcatcttctgcaagtacatgcaagaggccttccgagtgccctttatcatccagatcaccgatgacgagaagtacttccac

SEQ ID NO: 41819 - DNA, 465 bp, Oryza sativa
  Clone ID: uC-osroM202001b10b1
tcgttttctcttccccagctcgaccacgaccactcccgggagggagagggagagggagagcagcagcagcggtagccagttagtccagctgatgccgccgaagcggcggccggaggaggagtcgccgcaggcggcggcgctgaagaagcggtgccggtcgttcgacctagagatcaggggttgcaggcacctgcaggagctcgccgccggctgcgtccgcacgctcgaggccgcgctcgagtccgccattagccggattccagaggaggtgacaaaagcacttacaagcttcctaatccgtgctcctagaacactgtctgatcagaaccagcctccaaggtacaagcttaggttctcaaatggcttgagcaatgaagttttcacaaagaaaggaatctgtgatgttaatggagagtctctcaagatatctgtgcatgtaaacaacccacaagaggcctgctcgca

SEQ ID NO: 41820 - DNA, 493 bp, Oryza sativa
  Clone ID: uC-osroM202001b12b1
tcgctccgtgccagtacttgttggaccagtttcatacttgttgctctccaagcctgccaagggtgtagagaagtcgttcgctcttctttcccttctcagcagcatccttcctgtctacaaggaggttattgctgagttgaaggcagctggtgctacatggattcagtttgatgagcccacacttgttcttgaccttgactctcaccaattggctgcattctctgcagcgtacacagaactcgagtcggcactttctggattgaatgtgcttattgagacatacttcgctgacattcctgctgaatcatacaagaccctcacatccctgaacagcgcgactgcttatggttttgaccttatccgtggttccaagactcttgaccttgtcaagagtgctggtttcccctctggcaagtacctctttgctggtgctgtggatggacgcaacatcctggctgatgatctcgccgcatctctcaccaccctcgagtct

SEQ ID NO: 41821 - DNA, 587 bp, Oryza sativa
  Clone ID: uC-osroM202001c01b1
atcaatagctagtcattggaaccctctcagctgacaagttccctcaaatccagtttgatttggtctttgacaaagagtttgagctgtcacacacttcaaagactgctagtgtgttcttttctggctacaaagtttcccagccggctgaggaagatgaatatcctttgtaatgttttaccatgtttggtcaatatatgtaatgcatataatgtcatactctattttattttcattaaggtatgtattacaatattgttttccttgacctgccttttttgttgttccacaatggattttgattctgaagaagttgaaggtatgattgctactagtgcttgtgttctgcctagagagaatttaacgagcctgtttataatttatttcagatgaagaggaggaagaaaagatcattccagctcccagggcaaatggcaaagttgaagggaaggaaaatgagcagaaaaaacaaggcaagacagattcttcagcttcaaaatcaaaggctgcagtgaatgacgatgatgatgatgatgacagtgatgaggatgattctgaggacaagatctttctcctgaggatgatgatga

SEQ ID NO: 41822 - DNA, 498 bp, Oryza sativa
  Clone ID: uC-osroM202001c05b1
gtaggcttatggtaagccctggtgaatatttgtgggaggtcagtaagtggtggcctgattaagactgcatcagagaaatttgtggttatctttctttactaatgacggcattgacgagaatgaagttcccaaagcgctatgtcattgtgctgctgacattcatctgcacaaatgtttgttacatcgagcgtgtcggattctcgattgcttacaccgtggcagctgatgccattggcgtgaatcaagcaaacaaaggcatgatactttccatgttctactatggttatgtcttatcacagatccctggtggatgggcagcacagagaattggaggtagacgtgttctgctgctgtcatttgtgcatgtggtctttgatatgcggtttaattccactagaccccaagagagaagtcatcctggtcctttctcgcctttttgtcggcgtagcacaaggattcatatttcctgccattcacactgttctggcacaatgggtg

SEQ ID NO: 41823 - DNA, 552 bp, Oryza sativa
  Clone ID: uC-osroM202001c06b1
ttaatttgcttgacaatatcggaggtgcactgcactgcaccaacccaacggcacaggcatagtcgatctgacagacaagcaagcagggaactgaaagagagagagagaagaatataacccgatcgtctctgccttccattttgcttgtgcacagaagcttccactttctagcttgctagcttagcctgacgacgagaggaggcatgcagagctaagccgccattagcaagagaggaagaagaagaagaagaagaaggtagctgaagccatgaagccgggggggagcagcgggcggctgcacgccctgcggttcgagtcgcagaggttcaggctgctgaccatcgtcgtcggctgcttcctcatctccctcaccttcctcctctcctcccgccccgacgccaccgtcttctccaccctgagccccagggagtcgttggaagacgcacgcatgccggcgatgaagatgctgcaccgatcatcgtccggcggtctcatccgggatttccatgtcgacatcctgccgcagcagggagagagacatgctcatatgca

SEQ ID NO: 41824 - DNA, 479 bp, Oryza sativa
  Clone ID: uC-osroM202001c07b1
tcgctcaacgcaacacaacccaaccgcatcgcctcctccaccacccgcccgccacacgcccaaaaaacgccccgaaatcccctccaaatcgcccaaaaccaccgtacgccgtcgctacatggagaacggcaagtgcaacgggtcgtcgaccaccaagtgcaacggtgcggcggcggcggcgatgcacgtggcgatgctggtgacgccggggatggggcacctgatcccgctggccgagctggcgaagcggctggcggcgaggcacggcgtgacgtcgacgctgctcacgttcgcctccacggcgtcggcgacgcagcgggagttcctggcgtcgctgccgccggcgatcgagtcggtgtcgctgccccccgtcgacctctccgacctccccgccgacgccgtcatcgagacgctcatgtcggaggagtgcgtccggctggtcccggcgctcacggcgatcctgtccgggatcagggaga

SEQ ID NO: 41825 - DNA, 523 bp, Oryza sativa
  Clone ID: uC-osroM202001c08b1
gtccatctcggccgccgccgctgtcgctgtcgcgatcgcgatccccgcctagatagacttccccaagaacccgccgccgccgctgcaggggtggcgtggcatcgcgggagaccagctcgagccttcagcctcttttgcgccgccgccgccgccgccggtcgatccgtgttcttggctcaggcggcgtcaatggcggcggcgaatgggagcgcctgcggcggaggcggcgtggacaaggagaaggaggagttcaagcagatctacggggtgctcaaggaggagctgctcagggaccccgccttcgagttcaccgactcgtcgcggcagtggatcgatcgcatgttggactacaatgtacctggagggaagtgcaatcgtggtctctctgtggtcgatagctataagctgttgaagggcaccaatgttctaagtcaggaagacatgtttctcgcgagcactcttggttggggcgttgaatggcttcaagcttactttctcgtgcttgatgatatcatggatgatt

SEQ ID NO: 41826 - DNA, 573 bp, Oryza sativa
  unsure (1)..(573): unsure at all n locations
  Clone ID: uC-osroM202001c09b1
catccattatgtttccttgggaggctgaaatggtaaataaacggaagttggagtagccaaagaggtgaagccccccgctccactcctcccaactccgccgcctcacgccgccgccgccggtgcccgatcccgcacacgcgtatccctccagctcgccgcccgccagcccggcatggagcgcgtcgccggcggcggcggaggaggagccggcgaggcgcggggtgcagacgcgccgccgccgccgccggtggcggcagggggcgggggcggggcggtgaaggggaagtcctgcaagggctacctcttctactcgtcgtcgctcaggtcgcgagaccgcggtcccgtctgcgccggcatcacccgcgccatcccccaagtccctgatcacatggttggagaaattgagatggaagctatccaggaaggtcgcagcctttccgacttcagatatggatgtatcggctattccatgtatctggatgacangaagagttctgaagggaaaggtgacangcacccgaactgcctatttgtgtggaatcgagctttggctgatagaaaacttgactaata

SEQ ID NO: 41827 - DNA, 505 bp, Oryza sativa
  Clone ID: uC-osroM202001c11b1
tcgattacccttcctccgtaccagtcagcattacaggcttgacaaggcatatgaaatctttgcacaaaaagagcttgtacgggagcaagtttttgtgcttggtcgtatgggaaatgcaaaggaagctctctctacaattataaacaaattggaagatattcaggaggccgttgaatttgtgatggagcaacacgatgatgagttatgggaggaattgataagacagtgcctccaaaaacctgagatggttggaatgctgttggaacatactgttggcaatcttgatcctttgtacattgttagtttggttcctgatgggctagaaataccaaggttgcgggatcgccttgtgaaaattgtgacagactatcgaacagaaacttcattaagacatgggtgcaatgatatacttaaggctgattgcgtaaaccttttggtaaaatattatcacgaggctcggcgtggagtctacatggctagtatggacgaggaggtgacaggaact

SEQ ID NO: 41828 - DNA, 522 bp, Oryza sativa
  unsure (1)..(522): unsure at all n locations
  Clone ID: uC-osroM202001c12b1
tcggtttgagccgcctcgcctcgcctcgctcccgctgccctcaaatccccgatctccccgacccgcatccacagttccacacccacctcgtgctcgtcgcaccgccaccctctcgagcctcgccgccgcgtgattcgccggccgcgacggccaccaagatctccgccgaccgccgccgtcacccgacaaggaacttgaacagcccaggtcatattccagatggggaaagataaacaatgcgaaactgtggacgcggtcgggatggtgccaatggaggaagagaagaagtccaaggaggagatacatctcaagattaagagcaaggacaagtcttcaggtgatgaggatgagaagaaggagattgagatagaagtcaaagccaagattgtggacaaggaagaggtgaagcttgattcagatgatggcgcanagtccgcggtaaaaagtaaggactcaaagaaagacatggaaaataaaaaatcagacaggacggacgatgaacatgacgatgaggatgaagag

SEQ ID NO: 41829 - DNA, 563 bp, Oryza sativa
  Clone ID: uC-osroM202001d01b1
gtcttttgacctccagaaatcatcatctgactagctctgcgcttcgatggattagctgacgaaagaagacccttgttctgatttacagggttttcatcacattatttcgccatctgctgcaataatacttataactacaagctcaagtcaagcccccacgagcacaaatggcagaggctgtaatgcttgtggtctcaaagattggctccgttttattagaggaaatcaccttcacagtgataagcaagctatctgaaaagattactaatctgaaggaattgccggtcaaggttaaggaaatagggaaagaactgaacatgatgaacacttttataaaaaggataagtacaaccgatcttacagatgatgtcaaggcctggattgctgaggtgcgagagctggcccactgtgttgaggatgtacttgataaatattcatatcatgctcttaaattggatgaagaaaatgctgtgaaacaaatcttcaccaaagctaattatatcaaagttttaagcgaaattgctgatgagattacccagatcgaagggaaaattgagaatgct

SEQ ID NO: 41830 - DNA, 231 bp, Oryza sativa
  Clone ID: uC-osroM202001d02b1
gtccgttgccgttggtgggaacgagacggttgccgcgcccgcgcgcgagatcggagctccggggaggcgaggcgcaggcgcaggtgggcgcgtgttcttcgtcgggggcaccccgttcgcgctctaccgggagggatccgcggggcggggagtggtggggaacgccgcgagcgcagccgggatgggcgccgaggaggaggaggagccggcgtcggtcgtcgggagggaggg

SEQ ID NO: 41831 - DNA, 533 bp, Oryza sativa
  Clone ID: uC-osroM202001d03b1
ttcgttaaggctagcaacaccctgtcgatcatcgacagtggtgtcggcatgaccaagtcggacctcgtcaacaacctcggtaccatcgccaggtcggggaccaaggagttcatggaggcgctcgctgctggtgctgatgtgtccatgattgggcagtttggtgtcgggttctactccgcctaccttgttgctgagagggttgttgtgaccaccaagcacaacgacgacgagcagtatgtgtgggagtcacaggccggtgggtccttcactgttacacgtgatacctctggtgagcagcttggacggggtactaagatcaccctctacctcaaggatgatcagctggaataccttgaggaacgtcgcctcaaggatctggtgaagaagcattctgagttcatcagctaccctatctccttatggactgagaagacaaccgagaaggagatttctgatgatgaagacgaggaagagaagaaggatgctgaggagggaaaggttgaggatgttgatgaggagtagggagagaagag

SEQ ID NO: 41832 - DNA, 458 bp, Oryza sativa
  Clone ID: uC-osroM202001d04b1
tttaatcctttagcgccgccggcgcccgctcgccccgccgtcttcgcctccgctttccggtcgcgccgccgccgctcacgccctatccagcctctccatgaactatgcccaccgccaccgcatccgcgccgccagacccacctccgtatcgcgccgccgttgagacaactgcggactccgacgcacgccgacgtcttcgactacgtctcacggcggcgatggcccctagcgccacacgagttcgcctacccatcgagcacgcgaggccaccggcgccgacgcggcagagtgcagctaggccgcggaggctacgtccaccgccgtcaggcgcggtcgagttcaccttctccatcctcattggttgcactcgctgatctaattgtctcttctcccataaggtcctggctatctgctggagctgggaactcaagccatcttcgaggccgcgggggaaccct

SEQ ID NO: 41833 - DNA, 505 bp, Oryza sativa
  Clone ID: uC-osroM202001d06b1
ttatgtttgggcatgcccaatgtgtgtcaacatacatggggcaaagcggatgaaatgtaatatctgtaacaccactaagccaggtcacaatgaaggctgtgtgagaggaggccgaagtggtgggtataaagaacttgatgaagaagaactagaggaagttaaaaggcgccgcaaagaggctgcagaggatgacggggagatgtatgatgaatttggcaacctcaaaaagaaattccgtgctaaaacacagcaaactgaaaatgcaccaacccttcctgggtatggacaggctggatgggaggttgagcaacgtggttcaactagaagagaaagcagggaaaggagcagagatcgaggcagagaccatgactacaatgaacgggatagcaggaacagagatagaggcagtcatgggagagagcggcgccgaagccgaagtagaagtagagaccgtgagaaggaaagagggagggacaggggcagagaccacatctatgataggagc

SEQ ID NO: 41834 - DNA, 596 bp, Oryza sativa
  Clone ID: uC-osroM202001d07b1
ttcaaattcctcgccgccctcggtcgtcgccgccgcctccgccgcctcgcctcccggagattcgccgccttcgccgccgccgccatgaatcccgagtatgactacctcttcaagcttctgctcatcggagactcgggcgtcgggaagtcttgcctgcttctgaggtttgcggacgattcatatctggagagctatatcagtaccatcggtgttgattttaaaatccgcactgttgagcaagatgggaagacaataaagctgcaaatttgggatactgctggccaagagcgatttaggaccattacaagcagctactaccgtggtgcccacgggatcattgttgtttatgatgtgactgatcaggagagcttcaacaatgtcaagcagtggctgaatgaaattgataggtatgctagtgaaaatgtgaacaagctcttggtggggaacaagtgtgatctagctgagaacagagtgggttcttatgaggctggcacggcccttgctgatgagattggaataccattcctggagaccagtgcgaaggatgcaacaaatgttgaagaggcattcatgaccattgcaggagagataaagac

SEQ ID NO: 41835 - DNA, 510 bp, Oryza sativa
  Clone ID: uC-osroM202001d10b1
tcgctcctcctcctctcgccttctcccgtcttctccttcgagttagctacctccttattcaaccatgggtaaggagaagacgcacatcaacatcgtggtcattggccacgtcgactccggcaagtcgaccaccacgggccatctgatttacaagcttggaggtatcgacaagcgtgtgatcgagaggttcgagaaggaagccgctgagatgaacaagaggtccttcaagtacgcgtgggtgcttgacaagctcaaggccgagcgtgagagaggtatcaccatcgatattgccctgtggaagttcgagaccaccaagtactactgcacggtcatcgatgcccctggtcaccgtgacttcatcaagaacatgatcacgggtacctcccaggctgactgtgccgtgctcatcattgactccaccactggtggttctgaggctggtatctccaaggatggccagacccgtgagcacgctcttcttgctttcactcttggagtgaagcagatgat

SEQ ID NO: 41836 - DNA, 460 bp, Oryza sativa
  Clone ID: uC-osroM202001d12b1
tcgcttgaatccgcaccgtcccctttcctctcgccgccgacctcgtcggccgtctccaccgccggccggactacgcttccccatcggtgcggccaccccctcgaggccttcacatcagcgccgccaccaaccggttgcagtatcgctgatctcctcctcttaccaggaggcaagatgtcgtcgctcgccgcggcaagggcggataacttctactacccgccggaatggagcccaaagaagggtgggctcaacaagttccatggacaacatgctctcagggaacgggcgaggaagctggaccagggcatcctgattataagattcgagatgccattcaatatttggtgtggtgggtgcaactccatgatagcaaagggagtgaggtttaacgctgagaagaaacaagttgggaattattactctaccaagatatggagcttcaccatgaaatcaccatgct

SEQ ID NO: 41837 - DNA, 517 bp, Oryza sativa
  Clone ID: uC-osroM202001e02b1
gatctttgttagctagagtgttgagcaatggcgtccaagctgggtatggttgtgctactgatctcgggcctctttgctgcccgttgcgcggccgtggtgaccaccggcgaacccgtcgtcgccggcctctcctgggggttctatgacacgtcgtgcccgtcggtggagggcatcgtgaggtggcacgtcaccgaggccctccgccgcgacatcggcatcgccgccggcctcgtccgcatcttcttccacgactgcttcccgcaggggtgcgacgcgtcggtcctcctgacgggttcccaaagcgagctgggtgagatacccaaccagacgctgcggccgtcggcgctgaagctcatcgaggacatccgcgccgccgtacactccgactgcggcgccaaggtgtcctgcgccgacatcaccacgctcgccacgcgtgacgccatcgtcgccttcggcgggccctacttcgacgtgcctctggggcggcgcgacgggctggcaccggcgtcgagcgaca

SEQ ID NO: 41838 - DNA, 511 bp, Oryza sativa
  Clone ID: uC-osroM202001e03b1
gtccgtacacactcctatctatccaacaagctaattaagcgaggagcttggtagacggcggcaatggcgggcgcggcggcggcggccttcgcggcgcaggtgctgcgggggcggtggttcatggcgtacggctccttcctcatcatgtcggcggcgggggcgacgtacatcttcgccatctactccaaggacatcaagtccaccctcggctacacccaggagcagctcaacaccgtcggcttcttcaaggacgtcggcgccaacatcggcatccacgccggcctcatcgccgaggtcacgccgccatggttcgtcctcgccatcggcgccgccatgaatctcgggggttacctcatgctctacctctccgtcaccggccgcgtcggcgccaggaccccgctctggctcggctgcctctacatcgccgtcggcgccaactcgcaggccttcgccaacaccggcgcgctcgtcacctgcgtcaagaacttctccgagagccgcggcgtcatgc

SEQ ID NO: 41839 - DNA, 491 bp, Oryza sativa
  Clone ID: uC-osroM202001e05b1
ttcattcataagccagcagctagctagcaagcagcacacacatatatcacaggccatctctctatccctaattaagctatatactccatatagctagctaaacacaggaggagtggaggaaggagaggctagctgatctagctatctgcagtgattagttaaaatgatggcttctgataggttggatgcagaaaggatcatagagtacttcaagggcaagagcatcctcatcactggagcaactggctttcttggcaagattcttgtggagaagatactgagggtgcagcctgatgtcaagaagatctacctgctcgttcgcgccatcgaccaagcatctgcaaaccaacgcgtccaatctgagatgcgtgctgtgcaggtgacggagacggagctgttcagcgtggtgaaggagaagcacggcaagggattctcgcgattcatcgaggaagaggtgggtcgcccttgcggcgacatcatctacgacgacc

SEQ ID NO: 41840 - DNA, 529 bp, Oryza sativa
  Clone ID: uC-osroM202001e07b1
tcgttagactcagtgtgtcatcgatcatcaagctcttccatgtctcttgaacctcttgaccaacaatcataagaaaagcatcaagaaagaagcatgctggactatctcaaacatcactgctggcaatagggaacagattcaggctgtgatcaatgcaaacataattgctcctctagtacatctgctgcaaactgctgaatttgacatcaagaaagaggctgcgtgggcaatctcaaatgccacttctggtggaacacatgatcagattaagtaccttgttgcccagggttgcatcaagccactctgtgatctgcttgtttgcccagatcccaggatcgtgacagtttgcttggaaggtcttgagaacatcttgaaggttggagaggcagaaaagaaccttggggcaggggatgtcaattcctatgctcagatgattgatgatgctgagggactggagaagattgagaaccttcagagccatgacaacactgaaatatatgagaaggcagttaaaatgctcgagtcctac

SEQ ID NO: 41841 - DNA, 523 bp, Oryza sativa
  Clone ID: uC-osroM202001e08b1
tcggtgttccagtagcagcagtctccaactcctcttctcttcccttcccctcatctcgcgctctcgcctccgcgcggagctcgattcctaaaccctacctcgccgcgccgccgcgcgccggggagatcgccctcgccctccgccatgccgccgcgcgaggaccccaacggggacgcctcctccgcctccccctcggaccccgtcccgcctccgccgcagcagccgcagccgcagccggccaagggcaaggggaagaagaaggatgagaagaaggacgacgacctgtcggaggaggaccaggcgctcaaggagcagctcgagctctacgtggtgcgggcgcaggacaccgatcccggcgtccagaagctcgccctcgagagcatgaggcaggagatccgttctgcgacaagttcaatgacctctgtcccaaagcctctcaaattccttcgcccgcactatggaactctcaaggcttactttgagacaatgccagaatctgatcctgagaagtatatggctgata

SEQ ID NO: 41842 - DNA, 332 bp, Oryza sativa
  Clone ID: uC-osroM202001e10b1
tcggttcagggagctcgcccgcgccgccggattcaccggcttcaaggccacctacatctacgccaacgcctgggccatcgagttcaccaagtaggtgattggtgatcgatcgccattgttgagctcgatcaaggtgttcgaccatcgtcttcttcttctcgtacttcttgttcttcatccaaaagcgtgggtaatcatgtcgtttgctgctggctgatgctgctgctgcttgtgttgtacttttgatgttcaattccggtgattctgagttctaatggatgtaacctgtctgctattatatatatatatataatcgaatatatgatatattt

SEQ ID NO: 41843 - DNA, 407 bp, Oryza sativa
  unsure (1)..(407): unsure at all n locations
  Clone ID: uC-osroM202001f01b1
ctctgtttctcctcttcttttcttggcttgtgctctgttttaatttctttgcaatgatggggaggcagagctcgtcggcggcgaggagggtggtggtggtggtgtacacnactgatggtggtggcagagacagcagcgcataactacactgcgacggacaactactgggactggatcacggacaccggcaacctgtgcactaatgggaggccgtcgcatatcaccttcacctatcctccgtacggacagacctacatcggctcccctacctgccgctgctgcgacgggcgcgtaaccacccaacatctcccgagtaattttgggttgtccatcctgaccccaggaaaaatgacgagcgcctcctacaataagggagcgaacatggctaataccggaggcacccgcat

SEQ ID NO: 41844 - DNA, 379 bp, Oryza sativa
  unsure (1)..(379): unsure at all n locations
  Clone ID: uC-osroM202001f05b1
ctccccccttttccctcctcctccacctccactgccatggccgcctccgccgctcctctctcccgcgtggtagccgccgccggttgccgccgctaggggagcgcgacgggggagcggtaggggcgacccagctcgctctgtcgccccgcggctggtgggggtgcgcgcgggggagagcggttggttagtatggtgctggatctcaatgtggagtcgcgtgtgggatcggcagngacgaaaagctcgggcacaccgacggcgacgaccgactgtggcggccgggggtactgctggtggtgaccgcgcggttgcaccggccgacagcaaacatgacggcggtttctcctggctgacgggccctcggtttgtctttctaact

SEQ ID NO: 41845 - DNA, 405 bp, Oryza sativa
  Clone ID: uC-osroM202001f06b1
ttcgttaccaagctgctgggccgcatctactaccgcgtcgacgggtccccgtcccccggcacgctccccccgcacgtctccgcctccgtcaacggcgtggccttcgtgggcacgctctcagggcaactcttctttggctggctgggcgacaagctcggccgtaagcgcgtctatggcatcaccctcatgctcatggtgctctgctccctcgcctccgcgctctcctttggccacaccccgacctccgtcatggccaccctctgcttcttccgcttctggctcggcttcggcatcggcggcgactacccgctctccgccaccatcatgtccgagtacgccaacaagaagacgcgtggcgccttcatgtcgccgtcttcgcgatgcagggcttcggcatcatcaccg

SEQ ID NO: 41846 - DNA, 488 bp, Oryza sativa
  Clone ID: uC-osroM202001f07b1
gaagggtgtgtctcattctcggaaccattacatgttgccctcagatctgctcgtaggaatcaaggtaatagtttctctcttggtggttctggtggaagtaccagcgcaaatccttctcgtagtgatcatggcttgaagagaaatcagtctgcccttgtggcaagacgcagtggcacgatgttccgaaaccgttttaagaagcagttctccttcaaggggaggtttgggaaagatctcttcggtggtagagttttcaagaaggttggatcatcgtcttcttcaggtcaacaggacgatcgtcaacagccgaaagcctgactgaaaaaaaaaatacatgaagtagctagtatgaaatcgcgcgattataatgtgccctgctgctactctagcccctgtttaatcgagtgtgtcaagaagtcgtagtccatgtataatttatgatagaaggtgaaattctgtatgcatgcggccctgcgctagcacttatt

SEQ ID NO: 41847 - DNA, 411 bp, Oryza sativa
  Clone ID: uC-osroM202001f10b1
tcgctttgtgtctccgccgtgggacgcgccggccaagtccggcagcgtgaagcgtgtctcccggtgaataagcggaaaccactccgcagcaagcacctccggccgaagaatcgcccccaatcggccaatcctccccaccccgacttgtataaagtagcccgctgccggagccccgacgtgccacgtgctgacgtcatctggccgtggttggacacgtgtcatgacatccaaggcttcaaagctggcggagcagcagagggaaccatttcttggagtcgccggccgccctgctggtggtgaccgcgcggttgcgccggccgacggcgaacatgacggcggtttctcctggctgacggccctcggttttgtctttctaactttcaattcaggtatggcgatctaccgctcgga

SEQ ID NO: 41848 - DNA, 513 bp, Oryza sativa
  Clone ID: uC-osroM202001f11b1
tcggtcgaaaccatcggttcccctcctatctcgctctcgccggagttagatgcgcgtgagctcgtgtaggagagcgggagcgagcactaccgggtgagactccggcggcggcggtggccgcgatggcgttcatctccggcgcggcggagcctccgtcctcgtcggcggcgtgcaggctgcggctgcggcggcagctcctcctccgcccctcccacctccgcctccgcgccccccactccatcgcggacctctcccgctcctcctcgtcctcgtcggagcagcagccctcctctaccccggcggtgccgctcgcctccaggccggggcagaacggcagcacccgcggcgcggtggagaaggacccgatcaagctgtgggagaggtacgtggagtggctgtaccagcacaaggagctcggcctgttcgtggacgtgagccggatggggttcacggaggagttcctccgccggatggagccgcggatgcagcgcgccttcgcggcgatgcgggagc

SEQ ID NO: 41849 - DNA, 459 bp, Oryza sativa
  Clone ID: uC-osroM202001g01b1
attttgttaaggaaacaaaagaatatgaggtacttgatgaggagccaggtgacgatgaagagagtgcccaaaagaagtacaagttgcctatgtcagatattattccatttccaaagagaggggatccttccagtgccccagattttgggcagggtcgacaagtcttagctgtttatcctagcacaacagcactatatagagctactgttgcctctaatcgtaagaggaaatctgacgattatctactcttgtttgatgatgacgaggaggatggaaatctaccacaaagagctgtgccgttctatagagtggttcctctcccggagggccaccggcagtgaaaatctcagttggatccgtctttaccccggccagtgtagtgtgtgaagataggagtgtggaaatgtctgcctgacaatgtagtaattttgttttatctgcaccttgtccgcagcatgc

SEQ ID NO: 41850 - DNA, 476 bp, Oryza sativa
  Clone ID: uC-osroM202001g02b1
ctccttgccgcctcgccgcctcgcctcgcctcgcctcgcctccaccgcctctactaaaccctccgccgccgccgccgccgcggtgatcaccggcggccgagggatggagcagaatggagagaaccatctcaaagatccacttcttcaggcagatggaggcggctccggtgcttctcccgccggggcgtcgccgcggaaggagaggaagacgaggaaggtcatgttcaatgtccgggggatctcgtgtgcttcgtgcgccgtgtcgatagagacggtggtggctggcctcaagggagtcgagagcgtctcggtttcgccgcttcagggccaagctgttgtccagtacagaccagaggaagccgatgcaagaaccataaaagatgctatcgaaggcctcaatttcgaggtcgatgaacttcaagaacaggaaattgctgtatgcagactccagataaaagggatggcatgtacaagct

SEQ ID NO: 41851 - DNA, 466 bp, Oryza sativa
  Clone ID: uC-osroM202001g04b1
gtaactggggtggcatcgtcacaatctcttactaaatcaaaagcagatcctcaaagtaattcattctcgagttcttcgactgtttcaagtacaaaactaccttcttcatggaatgatgacacaagcacagttccgaaaatgacggaaggacgagatagtttgtctaaaaccttgaagccatataagcctggtattgcaaaggaaacccaagctgtaacatcactggagtcatcgcttgacatagacttctctaccataccttcagcttggaacgatgatgatgtcacatcagatggcatgtcaaaaggaagtgacgagaagcaggttgtaaatgacaatggaaagtttgaatgttcagtttcttcaaagccagctgaatcagggcatcttacattgaagtcaacgacatcaccaaagaaagacatcgcagtaaacagtaccaggcaaagtcctctaaattgtgtat

SEQ ID NO: 41852 - DNA, 526 bp, Oryza sativa
  unsure (1)..(526): unsure at all n locations
  Clone ID: uC-osroM202001g05b1
ccgacggcgacagggcgaccaaacaaaagtcctcgcatcccgccgccgccgccgccccgcctcctcctcccatgcgccgccacgtaggatcgcgcgatcagatctagggtcgagcactccactctcccgcctcccacgcgatgcggtggtggccggcgctgccgctgctcctcctcgccgtcgccgtcgccggtgccggcgacgcggctcccgtgtgcacgcggccgtccgcggctgaggcgatcgtgggatcccccgaggcgtgccgctcgccgctgcgccgcccgctcggcgtcaccgagggagatgatgctatcttagcgagggccgttaatctacttcatgcaaacaaggaggatttcgctgctgtgctcttctatgcttcctggtgcccattttcacaagaatgcagactacgctntgagaagttggcttgcatatttccaactattcgtcatcttgcaattgaagaatctacggtcaggttaaggacaagatatcggtatgggattcatggatacccaac

SEQ ID NO: 41853 - DNA, 437 bp, Oryza sativa
  Clone ID: uC-osroM202001g07b1
tcgatccgatcttaattacatcattagccagctaattaagtatatatctagcttgcttagctagaacacactctacagctaagctagcaatggcgcgcaataatggcgtcgcggtgatgttcgccgccgtggtcgtcgtcgccggcgcgctggtggcgggggcggcggcgcagagcgggtgcacgtcggagatggtgagcctggcgccgtgcctggactacatgcaggggaacgcgtcgaggccgacggcgtcgtgctgcgcggcgctgtcgagcgtgatgaagtcgaggccggagtgcctgtgcgcggtgctcggcggcggcgcctcctcgctcggcgtcaccgttaacaccacccgcgccctcgagctccccgccgactgcggcgtcaagaccccgtcttccagcgagtgcagcaaagtcggtgctccgattccg

SEQ ID NO: 41854 - DNA, 540 bp, Oryza sativa
  Clone ID: uC-osroM202001g10b1
tcgatcatgagcaaagccaaaaacattaagcccaaggtcattgaggactctgaagaagactccgacagctcgatccccatcattgctgccaagcccaccaagaaggagaaggttgaggagaagaaggccgtgaagaaggtcgccaagcctgccagctccgacgaggaagacacccccgtcgtggagaagaagcccaccaagcagcaaaagactgagaccgtcgccaagaaggtggtccccgtcgctaagaagcctgccaagcaggaatcatctgaggaggagagtgaggaggaggcccccaagaaggtggtcgccaaggctaaatctcccgtccagaagccagttgtccagaagaagaagccccagcctgaatcctccgaggagtcctctgaggaagaagcccccaagcctcaacccaagggaaaggtggcccaaaaggtcgcatcctctgtccagaaggccgtgtcccctgctgccaaggtgaccaataagcctgcccccgtcgttgagagctctgaatctgaggaggagtctgaggag

SEQ ID NO: 41855 - DNA, 431 bp, Oryza sativa
  Clone ID: uC-osroM202001h01b1
atccacccaccctctcgccgtcgcagatccgatccaggaagagctcgccgccgccgctgccatggcgctctccgtggagaagacctcgtcggggagggagtacaaggtgaaggacctctcccaggcggacttcggccgcctcgagatcgagctcgccgaggtcgagatgccggggctcatggcgtgccgcgccgagttcggcccctcccagccgttcaagggcgcccggatctccgggtccctccacatgaccatccagaccgccgtcctcatcgagaccctcaccgcccttggcgccgaggtccgctggtgctcctgcaacatcttctccacgcaggaccacgccgccgccgccatcgccagggactccgccgccgtgttcgcctggaagggggagaccctcgaggagtactggtggtgcaccgagcgct

SEQ ID NO: 41856 - DNA, 344 bp, Oryza sativa
  Clone ID: uC-osroM202001h02b1
ctcctttccaaaccctagcaaaggctatctctctcttcgccgccatggaggatgacgacgcggggggcggaggcggaggcggcgaggcgtccccgccgcacgcgggctccgccgcggcgatggcgggggcggggagggacatcgcggcgtcgccgacgagctcgcggtcggtgacgcagacggtgaacgggtcgcacaggttcgtgatccaggggtactcgctggcgaaggggatgggggtgggggaagcacatcgcgagcgagacgttcacggtgggagggtaccagtgggcgatctacttctaccccgacgggatgaaccctgaggacaactgcggctacgt

SEQ ID NO: 41857 - DNA, 444 bp, Oryza sativa
  unsure (1)..(444): unsure at all n locations
  Clone ID: uC-osroM202001h03b1
cttccttctgcatacaagaggctgcctcccatttctcttctctgtcggtgttctcctcaagatctgtcttaagttcttgagatctgtttcagaactaagctgagaagatggtgaagatctgctgcattggagctggctatgtcggcggcccaaccatggccgtcattgccctcaaatgcccagcaatcgaggtggtggttgttgacatttccaagcctcgcattgatgcctggaacagcgaacagctcccgatctacgagcctggcctcgatgaggtcgtgaaggagtgcagaggcaggaacctcttcttcagcactgatgtggagaagcatgtcgccgaggcgaacatcatctttgtatctgtcaacacccncaccaagacccgtggtcttggagcaggcaaggctgctgacctcacctactgggaaagtgctgctcggatga

SEQ ID NO: 41858 - DNA, 539 bp, Oryza sativa
  unsure (1)..(539): unsure at all n locations
  Clone ID: uC-osroM202001h05b1
ttctcatctccgcctcctccgagctcactgacaggtgggccccctccctcctccgagtcctcgccgtcgccgccgttgcctgctccgacctgacggacggagaggcggctggggctcgatcggacgccgccgccacgggaggccggaggaggggaggcacggcgaccggcgaccggccacgggtgggtgggtgcatgtcgacggccgccgcgtcagccgcgcgcggtaggtagatgaaattaaggaacacagcaataacacgagctaactcagcctgtcttccaatggaggattgtgttggtatcaagtacagcagtgtcaatgagggcgaagagcgtaagggaggccatggcgtcccaaaggtttccatcatcccactcattntcctcatattctatgaagtttctgggggtccgtttgggattgaggatagtgtcaaggctgctggccactcctagcaattgctggaattttgctgtttgactcatatggagtgttccggaagccctgattactgagaaatgggcactatgtttcct

SEQ ID NO: 41859 - DNA, 471 bp, Oryza sativa
  unsure (1)..(471): unsure at all n locations
  Clone ID: uC-osroM202001h06b1
tttcttacccctcgcaccccctccacctcgccgccgccgccgactcgccggggctcgccgccaccggtggtgggggggagctcgacctcctcgccccacgcgcgcgtccggacgccgtcgttctgggcgcgggagagatccgtccgtcgccccccgctgggcttgcgccatcctctcgccgggtgatttgagacaatcaagatggctttttcatcagttttcaggagaggaaatgtcaaagaattgatctcaaatgtttcggtctacactagcgcaacagagtcatctggaggattgagcttgatttttaagcgttgggccaccaaaaagacagctggatcaacaaaaaatggccgtgactctaaccctaagtatttgggtgttaaaaagtttggcggagagaaagtggagccaggaaacatcatcatccgccaaagaggaacccgcttcatcnctggaactacttggcat

SEQ ID NO: 41860 - DNA, 489 bp, Oryza sativa
  Clone ID: uC-osroM202001h07b1
tcgtttaggcacagaggagaagctccccccgctcaactcaccaaaaccctcctcccctcgaaatccttcccaagacgccgcacgcttctccatttcatataagattcccgagagacgccgccgcccgagaggcgtgggccgcgcgcgccgaaacatatcccgccggggcgccgccatggccggcgaggtggccatcgactccggcgagaagcgcctcaacgagctcgggtacaagcaggagctccgcagggagatgactctgttcaagacgctggccatctccttctcgacgatgacgctgttcaccgggatcacgccgctgtacgggagcagcctgcggtacacggggccggccagcctcgtctggggctgggtcgtcgtctccttcttcacctggttcgtcggcttcgccatggccgagatctgctcttccttccccaccactggttctctgtacttatgggctgctcatctggctggcccagtctg

SEQ ID NO: 41861 - DNA, 489 bp, Oryza sativa
  Clone ID: uC-osroM202001h09b1
tcggtcaagtcgctaataccaccaccgccgccccgtgacgacctcccctccccgcctccgatctccggccatggccgcgcgccgccccggatcgcccgctcccaggtgggcgccatggcccctcctcgccgccgccgccgtgctcctcctcctctcggccgcgccgcggacggcgcgcgccctccggttcgacctcgagtccggccacaccaagtgcatctccgacgagatcaaggtcaactccatggtcgtcgggaagtaccacgtcgtcggccccgaccccaacttccccgacaaccctctccccgactcccaccgcatctccctcagggtgacgtcaccgtacgggaacagcgtgcactacgcggagaacgtgccgtcggggaacttcgcgttcacggcgacggaggccggcgactacctggcctgcttctgggcgcccgaccacaagccgccggtctccatcgggttcgagttcgactggaggag

SEQ ID NO: 41862 - DNA, 489 bp, Oryza sativa
  Clone ID: uC-osroM202001h10b1
gtctcctcccccgcgtcggtcgcttcgcttctactggaggagagcagaggtggtggttggtgagagaggatgcgcggcggcggcggcggcggcggcggcggcggcgaggaggccggccagaagctgaagagcatggacgtcgacaagctggagaacggcggcgacaagcccgccctcaagtaccacggctggagggccatgcccttcatcatagggaacgagacgttcgagaagctggggacgctggggacgtcggcgaacctgctggtgtacctgacgcaggtgttccacatgcggagcgtggacgcggcgacgctgctcaacggcctcaacggcaccaccagcctcgcccccatcatcggcgccttcctctccgacgcctacctcggccgctacctcgccctcgccatcgcctccgtcgcctccctcatcggcatgttcttgctgacgatgacggccgccgcggacgggctgcacccggcggagtgc

SEQ ID NO: 41863 - DNA, 372 bp, Oryza sativa
  Clone ID: uC-osroM202001h12b1
tcggttctttttcctgcaaaaaccactcctagctaccttgtagttatgtatgcatactgctagtagtatgtgtataaatagggaagcatggagtggtttttgcctctttggtgcacatgtgaaacaacctcaagagttctttttcctgcagaaaaaaaaaaaaaaaaaaaaaaaaaaaaaaaaaaaaaagaaaaaaaaaaaaaaaaaaaaaaaaaaaaaacaaaaaaaagaagaaaatacaaaagaaaaaaaaaatcaagaaaagaaaagggggcgcccattttgggggttcaaaatttcagaccgcaggctggggaacaaataggtttttttaggggtcatcaaagtgaaattgctgggcccaattttaaa

SEQ ID NO: 41864 - DNA, 232 bp, Oryza sativa
  unsure (1)..(232): unsure at all n locations
  Clone ID: uC-osroM202004a03b1
cactccctccccttcctcctcctccggcgccgccagcaccacttctcagcggcggaggaggcggaggaggggaggggaccaagctccgccgcgccctctccttcgaggacgccgccaccgcctcggnctcggacacgccgtcgtctccggagaagaagccgagggtggttcccgatgcggatgcggtgggacggggcggggagggggaggtggactatacacccgccttaac

SEQ ID NO: 41865 - DNA, 546 bp, Oryza sativa
  Clone ID: uC-osroM202004a04b1
ctttaacacaactaactttacccccgcgcggtgattagagagagagaggcgggagagtaggagacagaaggagagttagccgccgagcacgacgactcctccctctcctctccccttccggcttacacgcgtcgggaaccgaagtccaaaccgagagaacatcgacatggcggcggcggtggcggcgcagctccgcgggccctcggcggcggcggcgaggaggtggccggccccctccggcggcgttctccgcttcgcgccgctcgctacgtcgacggtcccggcgtcgatcgcccggggatcgctccgcggggttcccgctggcgtcgtgctgcccaagccattgatagcaatgtgcatgaaggcggagtataccagcagtcctgttgatcctaatgctgtcgcggagcatacagaagatgaaaatcaacagccaaccactgtatcgcctactaatgcagaaatagacatagaccaagaggctgttcctcaacacaagggtgcaataatacatgacttttgctagggatcccttttggtggaatt

SEQ ID NO: 41866 - DNA, 196 bp, Oryza sativa
  unsure (1)..(196): unsure at all n locations
  Clone ID: uC-osroM202004a06b1
cagtaatttgacgccgcgagggcgggtggtttncgggccatttagatctccggtgcggcgcattgagcccagcgtgcgagggggcatggatctggaggccgcgcatggcgcggctgcggcgccagggaagcagaggaggaggagggcgagggagtcatggggagcgtcgctgctgctcgcgtaccagagcctcggg

SEQ ID NO: 41867 - DNA, 499 bp, Oryza sativa
  Clone ID: uC-osroM202004a07b1
atctccagctgatcaagagctcttaattagctgggtagtgattagctgcgcttgtgatcgatcgatctcgggtacgtagcaatggcgtccaaggcgttcgctctgttcctggccgtgaacctcgtcgtgctcggggtggcaagcgcctgcggcggcagcccgtcgtgcccgacgccgacgccgtcgaccccgacaccgtcaacgccgacgccgacgccgtcggcgttcgggaggtgcccccgcgacgcgctgaagctgggcgtgtgcgccaacgtgctgggcctgatcaaggccaaggtgggcgtgcctccggcggagccgtgctgcccgctgctggaggggctcgtcgacctcgaggcggcggtgtgcctctgcacggccatcaggggcaacatcctcggaatcaacctcaacctccccatcgacctcagcctcatcctcaactactgcggcaagaccgtccccaccggcttcaagtgctaagcaacgtgcatatgca

SEQ ID NO: 41868 - DNA, 445 bp, Oryza sativa
  Clone ID: uC-osroM202004a08b1
tttatctctcgattgatccacgaacagtgacacgtgcgctttcaaagaatccgcgatggccaccaagcagagcctctaccccgaggtgaaccagtcccaccccgacctcaacaccgccttcctcgccaaccccaaccgcgccgccactgccagccctggcggctcgctctacccctccgtcgacccgcagcagctcgccgagaacctcttccccgacgccgccgatgacgccgcgccgccgcctcccaccaccgaggaggccctcgtcgcggttccgggcgcgcagctccacctcgtcgaccccgaccgcagcatggacctcggtgccggcacgctctccgtcgtccgcctccgccagggggaccactccgtcgccgtcctcgcgaggctcgtcccggagaagcgcagccagcgccgcggcggcctcttcggcttcttgagcggc

SEQ ID NO: 41869 - DNA, 450 bp, Oryza sativa
  Clone ID: uC-osroM202004a09b1
gttttagactcatataaaacgctcttacgtcgtggaccactttattatgacaccggcggccgggtggacccaacagctgtcatgcttcgtgccatcagcagcacggtgctgctgctggctttctttccatatgcagccttagcttcaagcacttttgatctttcaggcaggcagtggacgctgcagaacagcaacaggtccatttcagcctcaaccaccctgccatcataccctttggaggtgctgaagaccaaaggagtcatcaacgacccgttgttcaggtatggcgaggcagacagcagatgggtggcagcagaaacctggacctggagcaccacctttgacagcactgagctgccaagcgtcatgagcagcaaagcagtgcagctgcggctggatgggctggacacctttgctttcgtgcagcttgacggacagacggtgctgact

SEQ ID NO: 41870 - DNA, 484 bp, Oryza sativa
  Clone ID: uC-osroM202004a10b1
tgttctccttcctcctcatcctccccaaccacgggtccttttagaagtcctccgggttctcctcctcctcgcagaatgcaacgggcaattcaagctatcgggtcacatggcagtctcctcaagtctgctgttctgcgacacatcagtgctccaaaaccatctattttacctgctgtatattcacgctccatgtcagtttcatctgctcaaatagaggagagtggatttgagactgccactgtggcagatattttgaagtctaaggggaagagtgctgatggatcttggctctggtgcactactgatgactctgtctatgatgctgacaaatctatgacgcaacacaatgttggagctctggtggttgttaaacctggacaggataaatcaattgctggtattgttactgagagagattacctcaggaaaatcatagtgcagggacgatcttccaagtaactaaagttggagacatcatgactga

SEQ ID NO: 41871 - DNA, 356 bp, Oryza sativa
  Clone ID: uC-osroM202004a11b1
ttcagtgctccgaccgacgcgccaatcaaccgggggcagttacaggacagtcgggcgtcgccgccgcgcgtcccacttggcccgcatcgcaacgccaccaggggacgcgaccgccgtctccccacccctccggcaacgcccgcccggggccgcggacgcatcagccgcccgccgccggggacgcccatggcgacgacgccggagacgctgcccaactcggaggccgtctcccacgcctacaagttcgcctccacctgggagaagaacgcgccgctcacggagcagcagaatgccgcgatcgccgcgctctcccgcgccgagtccgagcggacgatcccggccaacctggagaaaag

SEQ ID NO: 41872 - DNA, 346 bp, Oryza sativa
  Clone ID: uC-osroM202004a12b1
tttaccactcgaactaaagagaatggtcaatttgagtgtagttcaaattcattcggtgatggacaaaaaggaaaacattcgtaacatgtctgtcatcggtcacgtataccatggaaaaagtaccttaactgattcccttattggcgctgctggtattatagccagtgctaaagttggtgaacaaaggtatactgatactaggcaagacgaacaagatagatgtattaccatcaagtgcactggtgtatctctgtattttgaactcgaagagtccaaagtacctgctggttctaatggaaacgctcttctgattaacttgattgatttcccgggacacgttgacttc

SEQ ID NO: 41873 - DNA, 511 bp, Oryza sativa
  Clone ID: uC-osroM202004b02b1
gttttatctaattaatttacctcctccacctcctggtcctccccccaatcggatcggcccggctcctcctcctccgccgccgccaccgccggcgcagataggagaagatggccgcacttgataccttcctctatacctcggagactgagaacgagggccaccgctgacaagctctgcgaccaagtctcagatgctgtgcttgatgcctgcctcgccgaggaccctgacagcaaggtcgcttgtgagacctgcaccaagacaaacatggtcatggtctttggtgagatcaccaccaaggctaacgttgactatgagaagattgatagggagacatgccgaaacataggcattgtgacagctgatggcggtcttgatgctgaccactgcaaggagcttgtgaacatcgagcagtagtcccctgacattgcacagggtgagcacggccacttcaccaagcgccctgaggagattggtgctggtgaccagggacacatcgttggatatgcaactg

SEQ ID NO: 41874 - DNA, 460 bp, Oryza sativa
  Clone ID: uC-osroM202004b04b1
cttttctcgtcgcctcgcctcgcgagttcgcccggcgcctgtgccgagcagccgccgatctccgccacgcgagcagcggcgccggcgtcctgctacttccgccgcgtcctcgccggtgagcaaccaaaggaaggatgagtaggcgctggagcaggacaatttatgtcgggaacctcccgggcgacatcagggagagggaggtagaggatctgttctacaagtatggacgcattgttgatattgacttgaagatccccccaaggccgcctggttttgcttttgttgagttcgaagatccccgtgatgctgaagatgcaatccgtggacgggatggctataattttgatgggaaccgtttgagggtggaacttgcacatggtgggagaggtaactcttcctactttaacaattctggtggaggtggacgccgtgggggtcgaattaggcatacagagtatcg

SEQ ID NO: 41875 - DNA, 479 bp, Oryza sativa
  Clone ID: uC-osroM202004b06b1
ctcttcacagctcaaacaagtcaagagcgaatagggcttgctgatctgttgtttgattactttagatctcgagaggctttagctgaatccatcgatcgatcatggaggatgagaggaacacggagagccaccagggtggcgaggctgcagagcaggtggaggtgaaggacaggggcctcttcgacaacctccttggcaggaagaaggacgatcagccggaggagaagaagcatgaggaggagcttgtcaccggcatggagaaggtctccgtggaagagccaaagaaggaggagcaccacgccgagggcgagaagaaggagagcctcctctccaagctgcaccgatccagctccagctccagctcgtcgagtgatgaggaagaagaggtgatcgatgacaacggcgaggtggtcaagaggaagaagaagaaagggcttaaggagaagatcaaggagaagctgcccggccacaaggaccat

SEQ ID NO: 41876 - DNA, 510 bp, Oryza sativa
  Clone ID: uC-osroM202004b08b1
cttacatgtaggtcaacattgacctcaatgcccgtggacgccacccaggtctccgaactcatccaggcctccctctcgggggacaatgagcgcatcaaacaggccaccaagctgctcaagacctacaccaagcacaaggcctccatccgagtcctcacctacatcctggtcaactccacccagctggcacacagacagatggcagctgtcctgctcaagcgcaacctgatcaatctctacgagggactctcagttgaggagaaggcggaatttaggtctttgcttttgcagcaatacgccaaggagccgcatttgttggtccagagaggtatcgccacgctcatcagcattctgctgccagtggttgagatcaagaattgggtggaactacagcaacttttggacaccgctgtccaatcagccccctaatcagctgctactttcgtgctgcttgacagcatcctttatcacttcaagccttcagctgcactctacaactatcttctcaat

SEQ ID NO: 41877 - DNA, 456 bp, Oryza sativa
  Clone ID: uC-osroM202004b11b1
tttacatttctcgacacactcgcgcgcgcaggggcgcaattatggtgcacgagggtgtcaatggacatggccacgaggtgaccgtgaaggtgacgtccgcgtcgacggtggcgccggcgctgccggtgcaggagcaccggctgccgctgtccaacctcgacctcatcctgccgcccatggacgtcggcgtcttcttctgctacggcgccggcgagggctccggcggcggcggcgcgctgctgccggcggcgaccctcaaggccgagctggcgaaggtgctggtggcgtactaccctctcgccggcgaggtcgtggccaatacccgccgcgagggggagctcctgtgcagcggacgcggcgttgacttcgtcgatgcgaccgccggcgacgccgtgctgcgttagctccggcttgccgtggtcgacgagagcgccgagacgctcgtgcccaagaaga

SEQ ID NO: 41878 - DNA, 477 bp, Oryza sativa
  Clone ID: uC-osroM202004c05b1
catcaaagcttgctgctgacacgcctgggctaacatgacagcgtgtacgtgatgcactatttccctcagttcttggaggaacttgtgctattcctggagcatttggttgtggaaaaactgtcattagtcaggcactttcaaagtactccaattctgaagctgtggtttatgtgggctgcggggaaagaggaaacgagatggctgaggtccttatggacttcccacaattgacaatgacattgcctgatggacgtgaagagtctgtcatgaaaagaactacacttgttgctaacacatccaacatgcctgttgctgctcgtgaagcctccatttatacaggaattacaattgctgaatactttcgtgacatgggctataatgtcagtatgatggctgattctacttctcggtgggctgaagctctgcgtgagatttcaggacgtctggtatgatgctttctttcgagatgctatttta

SEQ ID NO: 41879 - DNA, 426 bp, Oryza sativa
  unsure (1)..(426): unsure at all n locations
  Clone ID: uC-osroM202004c06b1
ctttccactactactactaccttttccttgagcggcngccgttccacgcccccgccctgccggccaacgagatcgatcgactatttgcgccgccgccgccgcctcctccttcccctggacacgtggcccgcccgagacgtcaaagaggaagaagacgaagaagcttcgctccgaccaggggtgggtgaggtgaggtgaggggtggtatctatngatcgagccagtctcatcgaggatggctagttagttaatttccgagggcgatgtcgacgacgtcttttcgtacggagccatgaaccgctgcacggacttctttatcttcataccgatgttctttttcagcacaagcgcacccaggacatgttctgactccaccaggcctacgaccgcgggtagcttatcgagtagctgctacttcccccaaaa

SEQ ID NO: 41880 - DNA, 529 bp, Oryza sativa
  Clone ID: uC-osroM202004c07b1
cttcctttccctctccttccttccagatctctccacgcgccgccccgatctcttccccccacccccacctcgtcaccggcggggaggagggcccggccgccggcagccatgatctcctccagtaagctcaagtccgtcgacttctacaggaaaattcctagggatttgaccgaggcatcactatctggggctggattgtccattgtagcagcactagctatggtgtttttgtttggaatggaactgagtaattacttagcagtcaatactagcacatctgtgattgttgataggagttcagatggggagttcttacggatagattttaacttaagctttcctgcactttcatgcgaatttgcatcagttgatgtcagtgatgttctgggaacaaacagattgaacataacgaaaactgttcgcaaatattcaattgatcggaatttagtgcctactggatccgagttccacccaggacctattcctacggtcagcaaacatggagatgatgttgaagaaaccatgatga

SEQ ID NO: 41881 - DNA, 519 bp, Oryza sativa
  Clone ID: uC-osroM202004c10b1
tttcgcacagcctccagtagcaccatttattccggctccttggcctcctccagccatttaacaaaaggttccagtgctttgacgaaagattgcctgccctttgggtttgaacccttgcggaaccaaaggaggatggtatcttcagctaggacatcttggtcatacagcgttctgattatttcaggaaatagcttcatcagcttagcatcctcatagcactgtgtctgaactttgtatatgagttcgagttcaagcctgccacttgtgcagaatgcattcaaaaggccagcccatgctttcacctgccgaagtgctgaattagaattttgttgctggttcttcccagaccactgaacagcctccatcagcacatcccatagcatgcgaacaacctctatatcaggaaatttagcatctttcacctgttgcttgacagcttctgtgacttcagatatttcagcctcttcattgatcatttggtgcaggggtaactttatcttcttaagttaacctaaacat

SEQ ID NO: 41882 - DNA, 496 bp, Oryza sativa
  Clone ID: uC-osroM202004c12b1
tttccaccctcgatccagagacgcacgagccgggcgttgctttaaaccgttaattggctctctccacgactcgacgccgcacgacaaaccagcggaggcgctcgcgcgctcgccttcttctcgccctccatttgaacaaccccttcaattaactcctcctcgatcgctagctctctctctctcgttgcctcctcgatctccttgaatcgatcagcggcaaccagcctgatcgttgtttgctagttagttaatttccgtcgccgatgccgacgacgcctcgtcgcaaggagccatgaaccgctgcacggacgtcgagatcaggaacgcgctgcgcctactcgcgcccaagcccaccgaggacatgtcccgcctccaccaggcctacgaccgcggctagcttagcgagtagctgctactagcgctcataatcattctgtgttccatcgctcgagttcttgaacacgaagaggagcttaagagtttgtgtcagctgtta

SEQ ID NO: 41883 - DNA, 360 bp, Oryza sativa
  Clone ID: uC-osroM202004d01b1
gttttcaagaaagaaaaacctgcttccctagtgaggggcatttagaaggtgtatggggcttaaaatgctgttgctgacgttaaggagaaaaacctgaagtcagcttcaccaaaagtgagaaaagtggaagttagcaagaaagaaagccgatcttagaaagaaaattctgccactccaagaactgaaaacacaaggcagtcaaagtcctcaaccatcccagcgcaggtccctcgcaggctaactttccaactaggaaaggtactgaacctacagagcaattcagagtagagcagcacgccgagactgcttctgttcaagcctgcaaagactgtagaagacagcaacaggagcaaagaattc

SEQ ID NO: 41884 - DNA, 511 bp, Oryza sativa
  Clone ID: uC-osroM202004d02b1
agggggcccccggcgggcccggcccggtatccggggggagccacagcgcgcgcgttctcgaacaaggagcgcctcctgccttatgggggtctcttcaatcttcctggaggcatggcggcgatggcggtgggctgcctcctgtgcgcgagggcggcggcagcggcgcccacgctgcgcctacgcggcggaggcaggggagcacgcctggtcttctcctgctgcggctcctcgtggtcgccgtacggggaaggagggttcagtgggaaggtggggttcctcggcctcgggatcatgggcgcacccatggcctccaacctcatcaacgccgggtgcgatgtcacggtgtggaacaggaccaggagcaagtgcgacccgctcctcagcctcggcgccaagtacgagcctacaccggccgatgttgcttccggttgcgatgtgaccttcgcgatgcttgctgatcccgatagcgcggttgcggctgcatgcggggccaatggagctgcacagggga

SEQ ID NO: 41885 - DNA, 516 bp, Oryza sativa
  Clone ID: uC-osroM202004d03b1
ttttcatcgagggttttcctctctctctctcgcagggcattcatcccctcgtgtcgccgccggcggaggctgcggcgagccttcaccccccacccgcccaccgtcggcgagccacggcgtgggcgacctcctctcctctcccgatcccctctcgcccttaggtaggggcgtttgcccagttcccaccacacgcgcgtgcgtgggcgacgagcaccctaggttcggatcggatggaagaccagaagaaaaatgcaaaaccagacgggtcttctggctcgcaaaggggagctcccccggcacctgatgcaggccttcccaatccttgtgattcttctcagcttagcaacttgctcaatgatccatctataaaggagatggcagagcagattgcaagcgaccctgtgttcacccagatggcagagcagctgcagaagagtgctcatgtgaccggtgaacagggtggccctgcatgggatcctcagcagtacatggaaacaatgacacaagtcatgcaaa

SEQ ID NO: 41886 - DNA, 491 bp, Oryza sativa
  Clone ID: uC-osroM202004d04b1
gtgttgagcaaaaatggcgatcgcgatctctcaggaggcgttcgacgccatggtgcgggagaacatggaggacctcggcatggacgccgacgaggccctcgccgacgccgtcgacgccctcaccctccaaggtgccgacctctccgggatcatcaagcgcgtgcctggagaggccgccgcggcggaggtgagcccggtgatgcgggtgctggacgaggtgaaggcctcttctgccagtgacagtgacagtggcggcaggtccgaggaggatgctgagaggttggcctctttgctcgacgagttgcgcgagctgtgctccggcgatgggttggagaatgcggcggtcgctgctcggaatggcggcgtggaggcgctcgtcgccctgtgcgcgtcggctggggttaagcaggagagactacttgcctcgggcttgaaggcgctaagctccttgctccgcgatgttggaagcactgaaaagttcaggcaaagcg

SEQ ID NO: 41887 - DNA, 561 bp, Oryza sativa
  Clone ID: uC-osroM202004d06b1
gttggtggtaatgatcattgcccatctcgtcaggattgtgttgatgatgaaaccaagcatattgaaacatctgctgaccatcatgatagtcagggtagggagaactctgatttgcaagcccaagattacaagggcaccagctgtgcagatagaagcatttcattctgtgccagcaacgtagaggagcagaatgaagatttcgtgaatacaaaattcagtaatgatggtccagatgttcaagctgaagatttcaaagaaataagctatacagatacaactattattgatcatagcccagagagccggcagatcaagactacctgttatacaaccgctcccattgacactcgtgagagccaaaatacacaagctcaaagtcttgagggcattacttacacagggccatcaatgcatgctcatgagcaaaatcagggcctgaaaggcaccagatacaaaattatgatagacaaaggccatagtgcaaatgatatttctttagtaaacagttatccagagatgaatgatgtaactatggatttcgaagaggttgagaatactaca

SEQ ID NO: 41888 - DNA, 420 bp, Oryza sativa
  Clone ID: uC-osroM202004d07b1
ctcaccaacatcgagcgcgtcgagtcgaatcgggccacttcactccaccccgcgagtctcctctcctctcgtctccggcgaagacgacgtgatgccacccagcgccgccgccgcaaccgtgatggcgcagtcgccgcgcagcctacacacgctgatcagcttcggccgcggcgccgacggcgtcgacgacgatgaggccacgcccgcgtcggtcgacgttggtgacgcggagggcgccgggctcgacctcgacttcgcgttcgcgccgccggtgtcggcggccgagctggcgccggccgacgacattttcgcgcacggccgcatcgtgccggcgtacccggtgttcgaccgcagcctcctcgacctctcgcccggcgacgccttcacggtggtgcccttcgccgacacctactgcgcgtg

SEQ ID NO: 41889 - DNA, 520 bp, Oryza sativa
  Clone ID: uC-osroM202004d10b1
ttatcgagcagtagctaattgcatagtgatcgatcggtctgtatagatggtggtggccggcaagaagcagggacggcattctttttctgcatcatcatcgtcgtcttcgtcttcttcttgttcagtagtgcagctgggtcatcatcagcgcccacagggtgaggaccctctcatcggcatcaaagcagcagcagcaggaggaggaggaataatgagaaagggcccgtggacggagcaggaggacgtgcagttggtttggttcgtgcggctgctgggcgaacggcggtgggatttcttagcaaaggtgtcaggtttgcgcggcggcgggtgatgagcatatgcgtgcgtgcatctaatctatcgattaattgttgatgatgtcgatcagatggatggatgcatgcatatgccgtacatagtagatttgatgatagtaactgacataaatataatgtatgcgtgcgatcaacgctggttgttggatcgtccgtcgtgtgtattggtggtgtgtggctgatgc

SEQ ID NO: 41890 - DNA, 343 bp, Oryza sativa
  Clone ID: uC-osroM202004e01b1
gtttgtcaacgtcccaagcgaccgagccaagcgcggcacccgccacactgtcacagacgcgacgcgctcccgctgcccgacgatgccggcggcggcggcgctgtccgacgacgaccgactggtcgtcgcacactgtgccgcgctgttcttgctacccgggttccagccgaagcagtttgccatcgccatgtcctggtactctggcgtcggggcgggcgcttccttccaggtgcagcacgcgttccactcgtacacctgcgccgacatggcgttaccgccatggtggttcaacgcgcccgagtggggcgtcaaggagcgcgcggcgttggaagacgccccggtg

SEQ ID NO: 41891 - DNA, 351 bp, Oryza sativa
  Clone ID: uC-osroM202004e03b1
gtttggggagggcgcgccgatctccatccggcgaggaggggttgggagggtcgatgatctccatctggcgagtagagcaggcgaggggaggggaggggatccgatcgatgattccacacaatgcagatttggaccatatcagcacacctttagaaagtgttgaaatacctttggctataaatgttgaaagtcagcacattatttgacgattctatggcatggaaggggatactttgctagctgacatacaactggtacttccaaataggtgctatgtggtaccttcaggcatgcacatagctaatacataatcataggctactatcacatgtgacgaagctcttaacaggg

SEQ ID NO: 41892 - DNA, 572 bp, Oryza sativa
  unsure (1)..(572): unsure at all n locations
  Clone ID: uC-osroM202004e04b1
ctcgctgcctgctacaatgttccctcaacgaacaccatgtcctcctggagggttcccttctgaagcccaacatggtcaccccaggatctgaatccaagaaggtttcccctcagctcatcgccgagtacaccgtccgcgccctccagaggactgtccctgctgccgtgcctgccattgtcttcctctctggtggacaaagcgaggaggaggcgaccgtgaacctcaacgccatgaacaagctcagcaccaagaagccgtgggctctgtccttctccttcggccgtgctctccagcagagcacgctcaaggcctggggcggcaagacggagaacgtggtgaaggcgcagaaggccttcatcaccaggtgcaaggccaactctgaggctacccttggtacataccagggtgatgctgtgctcggcgagggtgcctctgagagccttcacgtcaaggactacaagtactgatctgcctctggtggtggctgaagatccgattggacatcctncgtatgcataattagggttctgagtgtggtttgctatcaagcgtcatctacgggatcaaaaact

SEQ ID NO: 41893 - DNA, 548 bp, Oryza sativa
  Clone ID: uC-osroM202004e05b1
ctttcttccgcctcgcctccccttcccctcctcggcgcctcgctcccctccgccgcgccgtcccgtcgaatcccgccatgccgaagggtgccaagaagcgcgccaagctcaagaagaagcagcagggggaccaccccgccggctccgatgacggcggcaacaacaacaacaacaaaaacaacgccgccgaaaacggcagcaatgactccagccgccgccgcgacgccgccagcgacggcaaccaccacctaccgtcgcgaccaaacgttcctcatgtggatgtgagtgaggactccatggagagctctgctgagattgcgaccacgagggccgccgcgtccgaggcggacgaggaggagaggaaggccgccacgtcggaggtgcccgtggaggtggtcgaggccagggaggaggtcatagcggacgccttgccggccgaaggcgacgaacgagcacacgagcaacagggtaaggcggaggcgcttgtggtggtgcaggaaccggaggtgaagcgcgaggaagtggtggccaggtgcattcgatgcatg

SEQ ID NO: 41894 - DNA, 485 bp, Oryza sativa
  Clone ID: uC-osroM202004e06b1
ctttacggccgcaacatcaccgtcaatgaggcccggtcccgccgctccggcggcggaggcgggggctacggcggcggcggtggcggctacggcggcggtcgtggaggcggcggctacggaggaggtggcggcggcggctacgggcgccgtgagggcggctacggtggcggcggcggctacggcggcggccgtggcggcggcggcggcggctacggtggcagccgtggcggcggctacggcggcgactccggcgggaactggaggaactgattggtggggcccatcgtggccagttatccttagctatccgtgtcagaatcatcttatcatcgagtcgagtcgttatcgtgtccagtggctctctcgagtcgagaagccctctatccatccatccagtgttaggtgttcttcgtccgtgatgttaccatgaattgagttcgctttggttatggggtttgaactgcttgttgctatctatcggaatg

SEQ ID NO: 41895 - DNA, 507 bp, Oryza sativa
  Clone ID: uC-osroM202004e07b1
gttctcctcgcgagcgatccccacctcgccgcggggcgcctacatctcgccggcgcgtagcgctcccccgaggtccactcctctcctgccggagaagcgggcctaggcgaagagcagcgccatggcgaccgcttcggtgtcgtttaagtctagagaggatcaccggaagcagctcgagctcgaggaggcgaggaaggctgggctcgcgcccgccgaggttgacgaggatggaaaggagatcaatccccatatcccccagtacatgtcctcagccccatggtatcttaacgctgataagccgagtttgaagcatcaacggaattggaaatcggacccgaactacaccaagtcatggtacgataggggtgctaagctttttcaggctaacaagtacaggaaaggagcttgtgagaactgtggagccatgacttatgacaagaagtcatgcatggagcgacctcgcagtgtgggagctaaacggactaacatcaatttagcaccagatga

SEQ ID NO: 41896 - DNA, 423 bp, Oryza sativa
  Clone ID: uC-osroM202004e09b1
tttgatactggcttcagtgctccagttagagagcggattttaaagtggcgtgagggaacttatgttccaatatcactggccagatccttgccagcctcgtcatgaatccaccaaaggctggagatgcatcatatgcttcatacaaggcagagaaagatggaatcctccaatcattagctcgccgcgcaaaggcattggagaatgctttcaacagtcttgagggaattacatgcaacaaaactgaaggagcaatgtacctcttccctcagcttagtctgccacaaaaggcaattgacgctgctaaagctgctaacaaagcacctgatgctttctatgcccttcgtctcctcgaggcaaccagaattgttgttgaccctggatctggatttggtcaagttcctggcacatggcacattagatgca

SEQ ID NO: 41897 - DNA, 489 bp, Oryza sativa
  Clone ID: uC-osroM202004e11b1
ttccgagcgaagcgaacgaaccaattctcctctcgttcctccgcacggaacagcgccgcgccgcgactcgccgcgaagccatggcggcgcgcgctcgcctccgcctcgtcctgcccccgctcgcggcgctgctcctcttcgcgcacctcgccgccgtcgcggtggcgcggccgcggtgggaggaggagggcagcaacctccgcctgccgtcggagcgcgccgtggcggctggcgcggcggcggacgacgctgccgaggccgccgagggcaccaggtgggccgtcctcatcgccggctccaacggctactacaactaccgccaccaggcggatgtctgccatgcctaccagatcatgaagaggggcgggctcaaggacgagaacatcatcgtcttcatgtacgatgacatcgcgcacaacccggagaatccgaggcctggtgtcatcatcaaccatccccagggtggcgatgtctatgctggggtcccga

SEQ ID NO: 41898 - DNA, 440 bp, Oryza sativa
  Clone ID: uC-osroM202004e12b1
tttagagagagagagagagagagagagagagaggggtgatcgagttgcagcaatggcgaggagggcgccatggctcgccgggattggggccgtgccgttcttgatcgtcgtcgtggtggcggtggtgggcgccgtcgtgccggcgatggggaggttcgtggtggagaagagcagcgtgagggtgctctcgccggagcacatccgggggcaccacgacgccgccatcggcaacttcggcgtgccggactacggcggcacgctcaccggcgtcgtcgtctaccccgacaagaaggccaccggctgcgccgagttcgacgccaagttcaagtccaagtctcgccgcccggtcatcctcctgctcgaccgtggagagtgctacttcgcgctgaaggcgtggaacgcgcagcaggcggtcgcggcggcggtgctgatcgcggaca

SEQ ID NO: 41899 - DNA, 439 bp, Oryza sativa
  Clone ID: uC-osroM202004f03b1
gcttgaagtgcgcgccgaggccacaaggccaaggggggagattgacggcaagctgtggccatactactacgaggacacctccgatcaagggagcagcgtgtaaaggtaaaaacccccaaaagagaagaagatgacaataggccaatagctgcttccatgaatcttctcccatggcttgtagagctgtagctaggtaggaaagctgcaatcataacccagtcgtgtccaaaattctatagttgctgattttgagcgctgaatttgctcgccgccgacgccgggctccgacagcacggttaactatggagctgtgcactccagttcggcaatgtaggacagtaagatagtggatgtccagtggacgtggtccacattgctgtatgtggaccgcgccattgatgccgcgagggcaaatcgctccgttgctggccatttatag

SEQ ID NO: 41900 - DNA, 422 bp, Oryza sativa
  unsure (1)..(422): unsure at all n locations
  Clone ID: uC-osroM202004f05b1
gtgtgttgatagtacactgtcatggaatgctcgccgccaggttgctcttggttcaggaaaggccttagagtatctccatgaaagcttccagcctccaattgtgcatcagaactttgaaccggctaatgtactccttgataataaattttcagtgcgtgttgctgaatgtggactagaaaaattgttggcatcaagttctgncactcagttggcagatcgaatgcattcactgttgaactatgaaccaccggaattccgggaatctgggatagttacagaacaaggtgatgtttacagttttggagtagtgatgctagaaattcttactgggcgtaaaccatacgacagttcactcccacgtgctgagcaacattttgttagatgggccaattctcagcttcatgacatagaatcactgtcca

SEQ ID NO: 41901 - DNA, 434 bp, Oryza sativa
  Clone ID: uC-osroM202004f06b1
gtcggatgatgatgacatttggtgaggctgtcaagtacaacagctccttgggtgcgtttaagcagattgttgcgaaggagggtgcgaagtcactcttcaagggcgctggtgctaacattctgcgtgctgttgctggtgctggtgtgcttgctggatatgacaagctgcaggtggtcgtctttggtaagaagtacggttctggtggtggctaagactagatgatgatgataagcagtggggaactatggacatattaggtgctttcggatgctgttgcgtttaaataaatttaacgtatggacaccgtttacatgttattaggcgtcaggtgaggtttctgagtgtgtaaaatcggtggcagatgcttatgccttttttgttgggggatcgagcaagacgagttttcctagttgaaaacatgccaaattattgtc

SEQ ID NO: 41902 - DNA, 507 bp, Oryza sativa
  Clone ID: uC-osroM202004f09b1
ttttcctcctcccatctgcgcttcccttcttcggcttcttcgttgatccactcacccgccgcgcgcagaggaggccatggcggatcagctcaccgacgaccagatcgccgagttcaaggaggccttcagcctcttcgacaaggacggcgatggttgcatcacaaccaaggagttgggaactgtcatgcgttcactagggcagaacccaacggaagctgagctccaggacatgatcaacgaggttgatgctgatggcaatggaaccattgattttcctgagtttctcaatctgatggctcgcaagatgaaggacactgattcagaggaagaactcaaggaggccttccgggtgtttgacaaggaccaaaatggcttcatctccgctgctgagctccgccatgtgatgacaaatcttggcgagaagctaactgacgaggaggtggatgagatgatccgagaggctgatgttgatggtgatggtcagataaactatgaagaggttgtgaa

SEQ ID NO: 41903 - DNA, 270 bp, Oryza sativa
  Clone ID: uC-osroM202004f10b1
ttcgacgctctcaaggtgtacagaccgttcagcggatgattggaacgtgaggggcacgtgtgctcgttaaattatttcttactatctctgtaccaaaatatagcaaactagtataaataggacgaaattcgggtagttctcaggtacgaattcatcgtactaggaaatatctcacattgtattaagttgctatattttgggtcagcattagtacaatattacacaaagaggaaaaaaaaaggaagaaatgtaacatgtggcgtttttcat

SEQ ID NO: 41904 - DNA, 495 bp, Oryza sativa
  Clone ID: uC-osroM202004f11b1
ttttcagcgaaagaccacgcgtgccatccctcggggcttgttgggtttccggatcggaggagagagccccccacgccgccgcagccatggttcgcggatcgctcgggaagctggcctcgcgcgccctctccgtcgccgggaaattgcagcaccagcagctccgccgcctcaacatccacgagtaccagggcgcggagctgatggggaagtacgggatcaacgtgcccaggggcgcggcggcgggatcggtggaggaggtcaaaaacaccttgaagaacgtcttccctagtgagaaagagatagttgttaagagtcaaatcctggctggtggccgtggattgggaacattcaaaagtggactgcagggtggtgttcatattgttaaggcagaggaagctgaaagcctcccaacaaaaatgcttggccagattctggtaacaaaacaaactggtccacaggggaagattgtgagcaaggtctacttatgtgagaaac

SEQ ID NO: 41905 - DNA, 254 bp, Oryza sativa
  Clone ID: uC-osroM202004f12b1
atcatatacacgtgacatacatggcttctgtgcgcgtgtttttaatgcatatatgggatctaaaacatcaggaattattaaggtttaggttttacctattagaattgatgtatatgtttggtgatctatatctatcctgtaatctgaatctgatcattttgtacgctttattaacctcaaacactaggaggatgctaccgataaccttatctccatgaacaagcttagcaccaagaatctcggggctctgtcct

SEQ ID NO: 41906 - DNA, 165 bp, Oryza sativa
  Clone ID: uC-osroM202004g01b1
ccacccgattccccggtccacccacacctcccggatttccatccatggcgacctacaacctccagctggccctatgaaacccgtactggcgtttcaaacaatctcccccaccgcctccggcgcctacaccgcctgcaccactcctatgaaggagaccatccataa

SEQ ID NO: 41907 - DNA, 526 bp, Oryza sativa
  Clone ID: uC-osroM202004g04b1
ctcttaccaagccaaccccctcgacggccggaacacgatcggggggacgcagccatggtgctcgaggcgacgatgatctgcatagacaactcggagtggatgcggaacggcgactactcgccgtcgcgattccaggctcaggccgacgccgtcaacctcatctgtggcgccaagacccagtccaacccggagaacacggtgggcgtcatgacgatggccggaaagggcgtgcgcgtgctcgtcactcccaccagcgacctcggcaagatcctcgcttgtatgcacggacttgaagttggtgctgaagcaaatttggctgcagcaattcaggttgctcagctggctctgaagcatcgccagaataagaggcagcaacagcggattatagcttttattggaagccctgtgaaatacgacaggaaagttttggaaacaatcgggaaaaagctgaagaagaataatgtggctcttgacatcgttgactttggtgaaaccgatgatgataagcctgagaaactggaagcgc

SEQ ID NO: 41908 - DNA, 509 bp, Oryza sativa
  unsure (1)..(509): unsure at all n locations
  Clone ID: uC-osroM202004g05b1
cctantaaatgctcctcctccgccgcctcctctcgctgagctgagctgagctgtgaaatagtgccaccgagtgagcgctgagctgagctcgaagcaagagaggaagaggaggaggagggaagagggggggcgaagatgattacggcggcggacttctaccacgtgatgacggcgatggtgccgttgtacgtggcgatgatactggcgtacgggtcggtgaagtggtggcgcatctttacgccggaccagtgctccgggatcaaccgtttcgtggcgctcttcgccgtgccgctgctgtcgttccacttcatctccaccaacaacccgtacacgatgaacctccggttcattgccgtcgacacgctgcagaagctgatggtgctggccatgctcacggcgtggagccaccttagacgccgggggagcctcgagtggaccatcacgctcttcttccttttcacgctgtccaacacgcttcgtatggggatccctttgttcagggcatgtac

SEQ ID NO: 41909 - DNA, 430 bp, Oryza sativa
  Clone ID: uC-osroM202004g06b1
gtttttgtcagttacccagatctcatcttacgcggggagattttaaagtcactagagttggtcttgctggccttgcggtcatggggcagaaccttgccctcaacattgcagagaaagggttccctatctctgtctacaacaggacgacttctaaggttgatgagaccgttcagcgcgccaaggtagaaggaaaccttcctgtgtacgggttccatgaccctgcatcctttgtgaactccattcagaagccacgtgttgacatcatgcttgtcaaggctggtgcaccagtggaccaaaccattgcaactcttgcagcacacttggagcagggtgactgtattattgatggaggaaatgagtggtacgagaacactgagaggagggagaaggcaatggaggaacgtggccttctctatcttgggatgggtgt

SEQ ID NO: 41910 - DNA, 456 bp, Oryza sativa
  unsure (1)..(456): unsure at all n locations
  Clone ID: uC-osroM202004g07b1
ttatcatccagaagattacaaannagcaatgaagatgggttgcttttaaaaaagcttcgggctgttcaaataagaacagaaaattcacgtggtctatggcagccattcaccgctcttcttggggatgtccctagtgtcgatgtcaagaagaatgttattgtagccattacctctgacaagggtctttgtggtggtatcaactcaacgtcagttaaagtcagcaaagcactccacaagttgacttctggaccagagaaagaaagcaagtatgtcatattaggagaaaagggtaaagttcaactcattcgtgactccaaggataacatcgagatgacagtatctgagttgcagaagaaccctatcaactacacacagattgctgtgctggcagatgatatcttgaaaaatggtgagtatgatgctctaagggttgttttaacaagttccactcgggca

SEQ ID NO: 41911 - DNA, 435 bp, Oryza sativa
  Clone ID: uC-osroM202004g09b1
gtctgagagcgggaggcctcctcccaatctcccgcctttttttaacatagttccggggtggcgctcttcagacgcgagcgcgaggagcaccgggtccgcttgccggtggccggcctgcctcgttagccgacgtcccgtccggggcgaaaggaagcataccttgttcacttccatttggagcttcccccattcgtacgcgcaccatttgttctacgaaatgccaccgcgcgctctgtccccaatggaggacgacaccggcagggactggcttggtgacctccccgaggaggtcctccaccacatcatgtcctttctagactcgcgctaggccgcgcgaacctgtgtgctgtcgcggcggtggcgcaaccctttggcgtaccgtgcctttgatcaacgctgactttgatgagttttgatctcgcttttaccacggga

SEQ ID NO: 41912 - DNA, 386 bp, Oryza sativa
  Clone ID: uC-osroM202004h02b1
gcgctctaccctcgtgaccaacccatctccccaccaagcccggtttaaaacatgaccggcgccgtctacaagctcgccgccccgaggccggcggccgccttgccgctcccgccggcgtacgtccgctccgagtttctggcctccgacctcttcccgcgctcgtttttcgtctccatcaacgtcgggcgcgccaggagccccatcattgcgatggcttctgtcaaggaaggaaatggtgccccaacgaagaggacaacccttgatgatctctattatttccagcgtaacagccccgtgggacgacaacccttggcggcctgtcaccgatttggtgccccttatttgggagcggggtgcggggagtcaccaggaacccattaattttt

SEQ ID NO: 41913 - DNA, 522 bp, Oryza sativa
  unsure (1)..(522): unsure at all n locations
  Clone ID: uC-osroM202004h06b1
tgcaactgcactacactttatcacacacaccccgcacccaccaagctaagtggttaatcatcaatggcttccgccgtggtgaagatggccgtcgtctgcctgctcctcctgtccgccggtcatctgatggcctccgccgccgncgngcgcccggacaccgtcgacgacgcggcggcgctgctgcgcctcaaggaccgcatcgagctgcaggaggaggaggccctggccctcgccgaggagctcgccctcctcgacgacggcgccggcgacgccgtcggagccggctgctcctgcagcaccaccaagtgcaagacgtgcatcgccacctgcgggatcaagtgcttccccaagggaatcaaaggcttccccacctgcttcttcgcctgcgtcttcaccaccagcaagtgcttcgccttcggcgcctaatcgatcaatcgatcacgtcgtcgtctcggctcgtcatcaatcgcgatcgatcggtcgntttcacctaataataatataatcatatgtgtgtgtgca

SEQ ID NO: 41914 - DNA, 420 bp, Oryza sativa
  Clone ID: uC-osroM202004h07b1
tctgcacgcttctcgctacgctatagaaaccgggggtcgtgtagacgagtctcgaagcacaaattcccctccttgctcccctctaaaccctccccctcgcgcggattcgcttccccgtgtctcccagaggggagttggtggtgttcctggagcttcttgggggtggtttttccaagctgcggcgggctcgccgaagttggatccggcggaagagaggatttctgggaagggtgccgcgaagctgctcgacggcaggctcgaggtggccttgaggaaatcgcttcaatttcgaacggcctgttcagttggctggacgattcatttcatgagcagaagtgtttacaccaagccgtagcagaagagggaatccttgatttgtcgtgggaataaagaggtgctcacctttgagttggacaatgc

SEQ ID NO: 41915 - DNA, 456 bp, Oryza sativa
  unsure (1)..(456): unsure at all n locations
  Clone ID: uC-osroM202004h09b1
gctgccggcgatcgccggaggacgacggcgagggggaggactgatccgcgtccgggcgggtcacccgccgccgcctgtcgccggaggagggcgcgctgtcgctggccgaggcgtcggcgtcggtggccgcggcgggggcgggggcggagagtagccccgggtggctctccagcatcgtgtccggagcgaggagggtgatctccttggtgttgttctcctctcccgaggaggccgccttaggggaggaggaggaggacgacgactaggaagatgaaacagaanacaatcatggagcaatagtttcatacaatgagtcaaagcttgccattgaggaaatggttatgaaggagacattctcaagggatgaatgtgataaaatggttaagctcatacaagcacgagttacagatgctgtacttcctgaagcacctgtgtttggaacgcccaaagaaattt

SEQ ID NO: 41916 - DNA, 237 bp, Oryza sativa
  Clone ID: uC-osroM202004h12b1
gtaagaaagaaaagaaaaaaaaaaggaaaatcggggctcgtttagactcgtcttcggctcccccgattcccgagcagcttctcgaaaccctcgcggcctcgattccggcgatggcggagcccaacccgcaagtggagagggaggtggaggtggaggaggtgaggaggccaaacctaaggtactcggagttacagcagggggcggcagaccatgcgacgaactggcttgcggggctct

SEQ ID NO: 41917 - DNA, 457 bp, Oryza sativa
  Clone ID: uC-osroM202005a04b1
gcggtctttttcctctaccctctagattgatggacgagcggctttattaggatttgtgggggccccatggacaattgcaacttatgttgttgaaggggggatgaccaacacttacacaaatataaagagcatgtgccacacagcaccaaatgtgttaaggggacttttgtctcaccttgcagacgccatatctgaatacattatttaccaagtaaactctggggctcaatgtatacaaatatttgattcatggggtggacaacttccacctcatgtgtgggagcagtggtcaaaaccatatatcaagcagattgtgaataagattaagattgaatgccccaatgtaccacttgttctttatataaatggaaatggaggcttgcttgagcgaatgacggacacaggagtcgatgttattggtcttgactggacagtggatatggcaaatggaaggaga

SEQ ID NO: 41918 - DNA, 377 bp, Oryza sativa
  Clone ID: uC-osroM202005a05b1
tttcagttcagtactcgtagctgcttctgcatgtttggttgatcgattcatcagccatggcgactaagctgcttgctgctgtgatcactgtgctagctttgctgggccatgtcatgggccaaggagggtacggcccaagcccaagcccaagcccgagcccgagttcgagcggcggcgggctcgccgtcggctactacgacagcgtctgccccaacgccgaggagatcgtgaggggcgttgtcaagaacgcggtggcgcaggacgcctgcgtcggagcggggctcatccgcttgctcttccacgactgcttcgtccaggggtgtgatggctccgtccttctcgacgcgacggcggcgaacacgcagcccgagaagctg

SEQ ID NO: 41919 - DNA, 276 bp, Oryza sativa
  Clone ID: uC-osroM202005a06b1
gttactttttcagttcttcctaaggtggttgaggatgctttgaagggcgagggcgaccctcaccgggcgaaatggtggtacgcgacgttccacagggtcaccgccatggtcggcgccggcgtgctcagcttgccgtacgccatggctcacctaggatgggggccggggacggcggcgctggtggcgtcgtgggggatgacgctgctcacgctgcggctgctgatcgagctgcacgagtgcgtgcccggggtgcggttcgaccggtaccgcgacctt

SEQ ID NO: 41920 - DNA, 446 bp, Oryza sativa
  Clone ID: uC-osroM202005a07b1
tttcgttatcagcagcaagcggaccacaggagggaggcgttaattgaaacgagggctgctaaacaaaccagcgagcgagcagccaacggcccatcaaagtgaggcaatcgtgaggggcgccggccccgcaggagcgctctcatgcacgttccgctccgcttccccttacccgacctccccggccacccgccattgctggcctgttctaggctaccgctcccgctcccgctcgtatggcacggagctggggcccgcgcacgaagagccccggggcacctaggttattcctgtcgacaccatgacggcgcttcagattctgcaggcaaagcaacgcttctatccacgaacaaagggcaaaacaaatgctcgctgccatctttcagctcattctgacagtcagggattccgcctgaacaaccaaaatctacccgtaagcacaatctcct

SEQ ID NO: 41921 - DNA, 432 bp, Oryza sativa
  Clone ID: uC-osroM202005a08b1
ttcctgtctcctcgaatcctaagccccggcgggtgctgttccctccctagcggcggctgctgctcttcctccccggcgtggtggcggttgctcccctccccgtcctggtggcatctgctacgcccccctccccggctgccccctcccctccccgacgtggagccgaaggcggctcctgctgcctctacccggtgtgggagcgtggcggcagcggcggcggctgcttccctcccggcgtggtggcagcagctgccccccctccccgacattgggttgacggtggctcctactctcccttgccggcatggtgacggcggctgaggcggctgcttccctcccccgcgtggtggtagcagctgcccgctgcctcctccttcccggctgcccctcatgtccccgatgtggagccgaaggcggctcctgctgcctctc

SEQ ID NO: 41922 - DNA, 481 bp, Oryza sativa
  Clone ID: uC-osroM202005b04b1
tgttatccccgttcgttttatttgcgtttacttcgggtcttgggaaggcacttccttcctcttcctaggaaggcttgaggagccaagaggaagaggagagcaatgggggaagctgccggcgaccgcgtcctgagccgcctccacagcgtcagggagcgcatcggcgactccctctccgcccaccccaatgagctcgtcgccgtcttcaccaggctggttaacctcggaaagggaatgcttcaggcccaccagatcattgctgagtacaacaacgcaatctctgaggctgatcgtgagaagctgaaggacggtgcttttgaggatgtcctgaggagtgcacaggaggggattgttatctccccatgggttgcccttgccatccgcccgaggcccggtgtctgggagtatgtgagggtcaatgtgagcgagctcgctgttgagttgctgacagtccccgagtacttgcagttcaaggaacagc

SEQ ID NO: 41923 - DNA, 470 bp, Oryza sativa
  Clone ID: uC-osroM202005b09b1
ttttgctgaggtgctgacaggaaagcctgtattttctggtaaaaatgttgtccatcaattagatttgatgactgatcttctgggcacgccatccatggatacaatttctcgggtccggaatgacaaagcaaggaggtatctgagtagcatgagaaagaaggagccaatcctattttcgcagaagtttcctagtgcagatcctttggcgttggatcttctacaaaaactattagcattcgatccaaaggaccgtccaactgccgaagaggcattggctcatccatacttcaaagggctcgcaaaagttgagagagaaccatcctgtcaacctatcacaaaaatggagtttgagtttgagcgtagaagagtgacaaaggaagatataagagagttgatatttcgtgaaatactggaataccatccacaattgctcaaagactatatcaatggcaccgagagaacaacctttc

SEQ ID NO: 41924 - DNA, 442 bp, Oryza sativa
  Clone ID: uC-osroM202005c01b1
ttcgtgtccttcctgcctgtgttcggcaagggggcagactccggttctgaaccgggccggccactgcgacccggcgtcgaacggctgcaccggcgtgggcgccgacatcaagtcgtgccagagcctcggcatcaaggtcatgttctcgatcggcggcggtgtcggcaactacggtctgtcctcccgcgacgacgccaagcaggtcgcggcgtacctgtggaacaactaccttggtggtacgtcgccgtcgaggccgctcggcgacgccgtcatggacggcatcgacttcgacatcgagagcggcgggggcatgtactgggaccacttggccaggtacctcaaggcgtacttccggcaggggagcagcaagaagccggtgtacctgacggtggcgccacaggggcccttcccggacgcgtcgctcggcgtcgcgcttagcacc

SEQ ID NO: 41925 - DNA, 525 bp, Oryza sativa
  unsure (1)..(525): unsure at all n locations
  Clone ID: uC-osroM202005c02b1
ttaccttctcctccggctcttcttcagtatcgaatcctctcttctcctcgtgcccaccaccaccaccgtagcaatggcgggcaacgggccgatcaacaaggaggacccgctcaactggggcgcggcggcggccgagatggccggcagccacctcgacgaggtgaagcgcatggtggcgcagttccgcgagccgctggtcaagatccagggcgccaccctccgcgtcggccaggtggccgccgtcgcccaggccaaggacgccgccggcgtcgtcgtcgagctcgacgaggaggcccgcccccgcgtcaaggccagcagcgagtggatcctcaactgcatcggccacggcggcgacatctacggcgtcaccaccggcttcggcggnacctcccaccgccgcaccaaggacggccccgccctccaagtcgagcttctcaggcatttcaacgccggaatcttcggcactggcttcgatggccacacgctgccgtcggagacggtgcgggcggccatgctcgtgcgcat

SEQ ID NO: 41926 - DNA, 439 bp, Oryza sativa
  Clone ID: uC-osroM202005c03b1
tttgtcggcattcatcgccgaaatccccaaatggacacggcgagcttgtgcaccgtggagaagcgcggcgccgtccacgtcatcaccctcaccggcgccggcgagcaccgcctcggcccgcccctcctgtccgcgctccgctccgccgtcaccgccgtccgcgccggcgccgccgggggcgccggcggcgcgctggtgattgccggcgagggcaagtacttctccaacggctttgacctggactgggcgcgcgccgcgccggccgagctgcacgcttccatgggcggcgccttccggggccttgtcgacgacctcctcgcgctcccggtgcccaccgtcgccgccgttaccggccacgccgcggcctgcgggtgcgcgctggcgctcgtgcacgacgccgtggtcatgcgcgcctcccgcggtttcctgtacatgagcg

SEQ ID NO: 41927 - DNA, 462 bp, Oryza sativa
  Clone ID: uC-osroM202005c05b1
gtctcttctctctccatttttctcgaagcgagagtgcgttgcgttgcgagcgggaagcgaaaactcgaaaccatggccacggccggcgacgagcagcagcagcaggcggcggcggcgcagacggcggaggtgacggaggcggcggcgaaggaggtggtgtccgtggagatgccggcgccggaggggtggacgaagaagtttactccccagagaggggggagatttgagattggttttgtctcaccaactggagaagagattaagaacaagagacagctgagccagtatctgaaggcacaccctggaggccctgcatcctcagagttcgattggggaactggtgatactccaaggcgctgtgctcgcattagcgagaaagttaaggctttcgatagcccagaaggggagaagatcccgaaacgttctaggaactcatttggcataaagggcaagcaggagaaa

SEQ ID NO: 41928 - DNA, 377 bp, Oryza sativa
  Clone ID: uC-osroM202005c07b1
ctagttctagatgcgagcggccgccctggttttttttttttttttttttgttttttttttttttttttttttttttttttttttttttttttttttcttttttgggaaaaagccggccccatttaaaaccaagattttgacagggaacaacaaacaccaggctaaaaaagcttagctaacttagaagctacagaacactgccaggaacaaaacaacttggggttaaagacccccaaaggaacccaatattttcatcaaaacaagggacccaatctgctgaggccgggggtgaaaagaaacttttccgaccgggacccgaaaatgttgcccagggaaaggcaaataggggccggggggaaactctgggatccccccac

SEQ ID NO: 41929 - DNA, 354 bp, Oryza sativa
  Clone ID: uC-osroM202005c08b1
tcgttcctcttcccaacactagtaggataaagccgcagagagagcagtagtagtagcgagctcgccggagaacggacgatcaccggagaagggggagagagatgagcggcggtcaggacctgcagctgccgccggggttccggttccacccgacggacgaggagctggtgatgcactacctctgccgccgctgcgccggcctccccatcgccgtccccatcatcgccgagatcgacctctacaagttcgatccatggcagcttccccgtacgataatcctcctcctccatcctcccaatcatcaccaccatcaacgccgtcgtgaattgattgattgatttggtttgatttgtt

SEQ ID NO: 41930 - DNA, 513 bp, Oryza sativa
  Clone ID: uC-osroM202005c11b1
tcgttctgggaaaggaagatatgaatgtcacccaggatattgttgataggcaaagggaagggcttgcattgctcaagtctgcatggacatctgagatggatgatcctctgtatgatgttgatcttgctcttatcatctgtaatgcaaatgcattcaaagatgggctattgtttctgtatgagaaactaaaactattcaaagaagttattagttgctacaagcaagctcatgatcacgagggtctaattgcctgctgtaagaagctaggagattcatctcaaggtggggatccatctctttggggtgatctgttgaaatattttagtgagcttggggaagattgctctaaagaggtcaaggaggtattgacctatattgaaaaggaggatgttttgcctcctattgttgtgctagagacattgtccaaaaacccatgcttgacactgtcagttgtcaaggattacattgcccgcaaacttgagcaagaatcaaagctaatcgaagagataggaa

SEQ ID NO: 41931 - DNA, 398 bp, Oryza sativa
  Clone ID: uC-osroM202005d03b1
ttatttcgatcgaatttcacccaaagtccacacaaactttcgattcgatttctccgatctcgcagcggtggcggccatggcgcagaggacgctggagctgacgctgatctcggccaaggatctcaaggacgtgaacctcctcttcaagatggaggtctacgccgtcgtcttgctctccggcgaccgccgctcgcggcagtggatcgccaccgaccgcgccgggggccgcaacccggcgtggaacgccgccccgctccggttcaccgtaccggcctccggcgcgggttccctacacgttctccttcgagccgagcgcgcccttcgcgaccgcgacgtcgacgaggtccacatacccctctgggagattctctccggagcacccgacggtgccgttcccg

SEQ ID NO: 41932 - DNA, 456 bp, Oryza sativa
  Clone ID: uC-osroM202005d07b1
ctcatcccagccgccgttcgccgcagcctcctcctctcgccatctcccgtcctcttcttcaagtcagctacctgcttaatcaaccatgggtaaggagaagacgcacatcaacattgtggtcattggccacgtcgactctggcaagtcgaccaccacgggccatctgatctacaagcttggaggtatcgacaagcgtgtgattgagaggttcgagaaggaagccgctgagatgaacaagaggtccttcaagtacgcgtgggtgctcgacaagctcaaggccgagcgtgagagaggtatcaccatcgatattgccctgtggaagttcgagaccaccaagtactactgcacggtcatcgatgcccctgggcaccgtgacttcattaagaacatgatcacgggtaccctcccggctgactgtgccgcgctcatcattgacttcaccactggtggttttga

SEQ ID NO: 41933 - DNA, 408 bp, Oryza sativa
  Clone ID: uC-osroM202005d08b1
tcggttttgcgttctctaatcgcctcgtcaagatgcatatattcgttaagaccctcactggcaagaccatcaccttggaggttgagtcctccgatacgattgacaatgtgaaggctaagattcaggacaaggagggcatccctccggaccagcaacgccttatcttcgctggcaagcagcttgaggatgggcgtactctcgcggattataacatccagaaggagtccaccttgcaccttgtccttcgccttcgtggaggcatgcaaatattcgtgaagaccctcaccggcaagaccattaccctggaggtcgagtccttcgacacgatcgataatgtgaaggccaagatccaggacaaggagggaattccaccagaccagcagcgtcttatcttttgtgggaagcaac

SEQ ID NO: 41934 - DNA, 513 bp, Oryza sativa
  Clone ID: uC-osroM202005d10b1
tcgttcttccacccccgaaaccactccaaaaccaagaccaaatctcgcggcgcatggcggcggcggcggtggcggcgaacggcggcggcgacggcgcgcaggcgtccaacgcgcccgcccccaccaggctcgcgtcggtctacagcgaggtgcagaccagccgcctcaagcacgcgctccccctcccctccgtcctccgctcccccttcgccctcgccgacggccccgccagctccgccgccggcaaccccggtgagatcgcgaagctgttccccaacctgttcggccagccgtccgtgtcgctggtgccgtcgccggagccggcgtccaccaggccgctcaaggtcggcgtcgtgctctccggcggtcaggcgcccggcggccacaatgtcatctgcggcatcttcgattacctgcaggaatatgcaaaaggatccgtcatgtatggattcaagggaggtccagctggagtcatgaagtgcaagtacgttgagctcactgcggattatgtgt

SEQ ID NO: 41935 - DNA, 513 bp, Oryza sativa
  Clone ID: uC-osroM202005d11b1
tcgttctgaatcaagtgatgacgttactgaaaaagctgctttaaaaacacttgaccaagaaccaatgctggctgctagaatcacaattgaagatggcctctgcctactgcttgatgtagatgatattgatcgcttgctgcaatttagccagcagcaagatggtggcttgcaactgagaaacaggagacaggccctccttgagcagctggcagaatccctgcaactagttgatccacttacacctagtaacaatgcacctctctcaccaaatgatgatctggtgtttctccgaatagtctctcttccgaagggccgcaagctactttctcgttaccttgaacttgtgagttctggcagtgagcttgctagaattgcttgcatggcagtcttccggcatctaagatttatatttggaaatttgccatctgatagtagtgctgttgagacaacgacaaaacttgctactgctgtatcaacctgtgttgttcggttggagttgagtggactaagtgc

SEQ ID NO: 41936 - DNA, 121 bp, Oryza sativa
  Clone ID: uC-osroM202005e01b1
tttggtcttcgtctccgtctccgtccttggggtgatgttcaaattcagtcgggttggcttgccagcaatggcgaggctagccggcgatgctgctctctcgttggtgctcgtcttgctcggc

SEQ ID NO: 41937 - DNA, 92 bp, Oryza sativa
  Clone ID: uC-osroM202005e02b1
ccgccgacgccgccgcgagctgaggcaggggtgttttaaactaagctgtcttaaggcatcaagaaggcgatgcggatgaacacgtaccaccg

SEQ ID NO: 41938 - DNA, 500 bp, Oryza sativa
  Clone ID: uC-osroM202005e05b1
ttcatgctctctctctctctctcttctctctttgggggtggttcttggtgcagagccgatctgcggcggcggcgggtgtggggggctcgaggagccgctggtcgggaagaggaggaggaggaagaacggccgccctgacacaatggcagatgtcttaggatgttacactataaagtcccatggaaccaaagtggcgagacttcacatgtacgactggataatacttctactccttgctgttatagatggactgttgaacataattgaaccttttcaccgtttcgtcgggagggacatgatgactgacttgagatatccattgaagggcaatactgttcccttctgggctgttccgatcattggaattgtattgccttgtgccatctttggtggaatttacttcaaaaagaagaatttctatgatttgcaccatggcatactggggaatctatactctgtgcttataactgcggtattcacagatgcattaaggatggtgt

SEQ ID NO: 41939 - DNA, 123 bp, Oryza sativa
  Clone ID: uC-osroM202005e09b1
tcgtccacgcgtccgattttcctcttcctgggcggggcgatttgagaattcaccttcttcttcctcctctcctttcgcctcctacctcttgctgcagcgcacggcgccgcgccatcatagagc

SEQ ID NO: 41940 - DNA, 512 bp, Oryza sativa
  Clone ID: uC-osroM202005e10b1
tcgtaactatcagagcacatatggcactcactcagcttctctgctccctcctccttgccaccgcattgctgctgctctccatctcccgtacagaggctggcgaggtgggcgtgtgctacgggagggacgcggacgatttgatggatccaccggccgtggtgaatcttctgaaggagaacggcatcacgaaggtgaggatctacgacgccgacccgacggtgctgagatcgctgtccaacacaggcatcaaggtgatggtggcactacccaacaaggaccttgcttctgcaggccacgatcagggaagtgcgctagactgggtgaaaacaaacattgttccgtactataaccagggcacacaaaataatggtgtggctgtggggaatgaggtgttcaggcaagcacccaacttgacccctcagctgttacccgcgatgaaaaatgtgcagaccgcgctagcgagactgggccttgccgacataataagggattaacacccattaatttgatgc

SEQ ID NO: 41941 - DNA, 460 bp, Oryza sativa
  Clone ID: uC-osroM202005e11b1
tgttctttcagctagtagcagagaggagaggagaggagttgttctgaggtaggataggagagcagcagatcagatcagatcgatccgggcaggcgggcagcatggcgtcggcaggtggctgcaagaagaagacgggaaatagtcgtagtaggagccctcgtagcccggtggtgctgcggagggcgatgctgcattcgtccctctgcttcctggtcggcctccttgccggcctcgccgccccctccgactggcccgctgccgccggcgccgccgtattcctccgcacgctccgtgccagcaatgtcatcttcagtcgcagtagcaataggccgcagcagccgcagctggtggtagtggtcaccaccaccgagcagtccgacgactcctagcggcgcgccgccgggctgacgcgcacggcgcacgcgctgcggatggtgtcgcctgcgcttttctggctggt

SEQ ID NO: 41942 - DNA, 189 bp, Oryza sativa
  Clone ID: uC-osroM202005f02b1
gtgtgtttaatgcctactgcttactgaactttggggacagcattacgacagaccatatttcaccagcaggtagcattcacaaagacagccctgctgccaagtacttgcttgagcgaggtgtggaccgtaaggacttcaattcatatggtagccgtcgtggtaatgatgaacttatggcaagaggaacat

SEQ ID NO: 41943 - DNA, 177 bp, Oryza sativa
  Clone ID: uC-osroM202005f03b1
tttctttataccgagggtaatgagcttccccgcctggtctacttatctcgtgagaagcgttctgggtttcagcaccacaagaaggctggtgccatgaatgctcttgttcgtgtctcagctgtgcttaccaatggacagtacatgttgaatcttgattgtgatcacttcatcaacaac

SEQ ID NO: 41944 - DNA, 486 bp, Oryza sativa
  Clone ID: uC-osroM202005f06b1
ttatttaaacccgccgtttccaagcttgctctcctgggccccctaaaccttccctgccgagtggcagggtgctcgacgggatggcgcagaaggaggccaatggcagcagcaacggggagcacaccacccgcccgccgtcgacgccctcgccgctccggttctccaagttcttccaggcgaacctgaggatcctcgtcaccggcggagctggcttcatcggctcgcacctcgtcgacaagctcatggagaacgagaagcacgaggtcattgtcgcaaacaactttttcactggttcaaaagacaacctgaagaagtggatcggacacccaagatttgagctaatccgtcatgatgtcacccagcccctgcttgtggaggttgaccaaatctatcaccttgcttgccctgcttcaccaatcttctacaagcacaaccctgtcaagaccatcaagacaaacgttatcggaacccctgacatgcttggac

SEQ ID NO: 41945 - DNA, 108 bp, Oryza sativa
  Clone ID: uC-osroM202005f08b1
tttcgtttgctgccactgcggacactgattttgagagagagccttaaggagtaggaagggatggcaaagaaggtcttcttcagggacatacggcccccaactgaagaa

SEQ ID NO: 41946 - DNA, 345 bp, Oryza sativa
  Clone ID: uC-osroM202005f10b1
gggaagcggaggagaggggaaggaagggagagaggcattcgacccggccgcgcagcttccccccctccctctctctctctctctccgccgcccccccctcccccctaccaccaccaccacccgccgccgccgcacgatgagctcctgcgccttctctcccccgccgccttcgtccgccgccgcgttggacgggagggtcacctctcacttggatcccttcctcctataggcgctcgacaacctttgccacccacttatggttctgcgtatggcaatggatatacataaatttatgccgaatcctcaactgcacgaatcttaattccctcattttccaacttctta

SEQ ID NO: 41947 - DNA, 490 bp, Oryza sativa
  Clone ID: uC-osroM202005g04b1
gtaattatcgccatctcgcatggctgcgccggcgtcgccgcgcgagcttgcggcctcgtcggcatggagcccgctaaggttgccgaaatactcaaggatcggccgctgtggctgcgcgattgccggtccatggatgtggtgaacgtgctccctgctggcgccaacggcaccatcgagctgctctacatgcagctctatgctccgacgacgctggcgccggctcgcgacttctggctgctgcggtacacctccattctcgacgatggaagcttagtggtgtgtgagagatcactcagtagcaagcaaggaggcccaagcatgccacttgtccagccttttatcagaggtgagatgcttcccagtgggttcttgatccggcctagcgatgttggaggcagcgtgatacacatcgttgatcatatggacctcgagccttggagcgtgcctgaagttgtacgacctttgtatgaatcttctgccatggttgcgc

SEQ ID NO: 41948 - DNA, 259 bp, Oryza sativa
  Clone ID: uC-osroM202005g09b1
tttcgtttctccttctccctcccctgttcttggagttccttgccggagaacttctgcggtggtctctgagttcgcactccaggttagaattctggtgcggtggctcgagctcgggttcgaattcggatttcctgggttggttgatcttgatcgcactcgcgggaagaagaagaattaggaagcagagtgatctctgatggtcacgggccgagaagggaagagataggagttgttgtcatggagcccgcgacggagacca

SEQ ID NO: 41949 - DNA, 517 bp, Oryza sativa
  Clone ID: uC-osroM202005g10b1
tcggtagatcaccaagtctccttcacactcccactccagcggcagctgagcagagagctccaccgccgccggccaccatgagttctcaccaccgctacgcccacctcctcgacgaccccttcttccccttcccaccgccgtcctcctcctcctgccccttcctctccccacccgccgcttcctccacctgcccattcttcgccctcgactcccccttcgctgctgaccctttccatctccaccccttcctccccacgccgcccactagctccctcctcgaccccttcctcctccacaccctcaccgaccgcgtctcccaactcgagctcgccctcgccgcccgcgccccacaccccaggcccaccagcaggaagtgcacctatgtcaccgagtccaccggccgcaaggtcaagtggaccaccgaggacaagcctcgcgccggcgagagggtgctcaagtgggaggctgagctcgactccccctacgacgatggattcgaccgcaagtggaagtggga

SEQ ID NO: 41950 - DNA, 432 bp, Oryza sativa
  Clone ID: uC-osroM202005g11b1
tcgttcacaccaaaaacgaatcagctcgtctcctggctccgcctccgcctccgcgagctcccattccattcccggattgcgccgccgccggtgttgcagcagccatggggatggggccactagagaacgccgtggtggacgcggcggcggaggccgtggcggcgaaggccgcggtcggcggcgtgggcgtggggggttcgtacgcggtgctgcagtgcggggaggactcggagtacgtgaggaaggcgtacgggggctacttcgaggtgttcagggcgctgctggcggaggacggcgagcggtggcgggtgtaccgcgccgtgcgcggggagctccccggggaggaggaggccgcggggatcgacgggttcgtcatctccgggagctgcagcgacgcccacgccgacgacccgtggatcgtcgccctcgtcg

SEQ ID NO: 41951 - DNA, 241 bp, Oryza sativa
  Clone ID: uC-osroM202005h03b1
atcttattctagcagccgctcgatgggggaagcgcgggggttcttctactcttcctggcggaaaattacaaatccctccttcacttatccaacaccttcgacaactggaaaccccgaattccccgtcgccttcccacccatgccgcatacccctaaaccctagacagcacctacaccgcggccgacggcgcatccaagcatttgtacatccacgactgcgacccggacatccactaggacc

SEQ ID NO: 41952 - DNA, 289 bp, Oryza sativa
  Clone ID: uC-osroM202005h10b1
gtccttccgccgccgccgccgccgcctgggcggcttcacatccccggacccggaggaggacacggatggcgatccgtctccgccgcccaccgtcctcgacggcctcgtcacgaccctcctctctcagaacaccaccgacgccatctcgcgccgcgccttcgccgccctcaaggccgcgttccccacctgggaccaggtttggtggccgcatccaggaagcttctagaagctccctcgtgtcctctgatgcgcgattcgttttcgtttttggaggtggtggataggagga

SEQ ID NO: 41953 - DNA, 477 bp, Oryza sativa
  Clone ID: uC-osroM202006a01b1
cactccccaatcctcccccgatctccccaatcctggagctcctgaagagcagcgcgggggcggaaatggcgctgcggcgagcgctgctcagatctgccgagatctcccccgatcgcaaggctgcacttgagtacctccattatctatcgagagcacagcctactcgttctctaacaggtgctggcctttattctgctggcaaatcattcagcactcaggctgctactacatcaagcacaccacaacctccaccaccacctccacctccggagaagactcactttggtgacctcaaagatgaggaccgcatttttaccaacctctatggtcagcatgaccctttcctgaaaggtgcaatgaagaggggtgactggcatagaaccaaggatttggtgcttaaaggggcagactggatagtgaatgaaatgaagaaatcgggactttcagggcgtggaggtgcaggaattccttctgggc

SEQ ID NO: 41954 - DNA, 424 bp, Oryza sativa
  Clone ID: uC-osroM202006a07b1
gtttttgaaaaggaagatatggttcaacaccaagcctcattctaacctttgcggtgtgattgagagccgattttgtggtgacactgttcaagctggtggagaaccacttgatgctcgggatcggcttcgcaacatgtgtgagcacgagagtatctgtggatccaggactgcaccatgtgattcttgtggacggtcagtcatgctgaaggacatggacattcatgtgattgctgtgcatcagaagagctaactattgtaaagcattggctctgagaaagatggcctgtcctttatcctgctgggctttaaccaccaaggccatgaagtttcagcactgctggaccaaatggtatttccttttgtgttacatatatcttgggtcattgggtacattgtaacactgtgtatgggagcattgaacact

SEQ ID NO: 41955 - DNA, 358 bp, Oryza sativa
  Clone ID: uC-osroM202006a12b1
ttttacgcctccacaaataaagctcgtcccgagggagggcgtagacccacccccgggaatcgccaaaaccctaactccgatccgatcgagctctgcttcccatggcgactgccgcgagccaggcgagcctcctgctccagaagcagctcaaagatctcgcgaagaaccccgtggatgggttctcggcggggcttgtggaccatagcaacgtgttcgagtggcaagtcaccatcatcggcccgcccgataccctgtatgatggaggctacttcaatgcaataatgacccttccccagaattatccgaatagtcccccactcagaagggttacctctgggatgtggcatccaaatgttta

SEQ ID NO: 41956 - DNA, 517 bp, Oryza sativa
  Clone ID: uC-osroM202006b02b1
ggattttccagttgagaattcatgatcagatgaggatgttattagatgcaaaagggtgggacagaaaccgttgatgctttgaggactggagctgcagctatgaaagcaatgcaaaaggcgacaaatattgatgacgttgataagactatggatgaaattaatgaacagactgaaaacatgaaacaaatacaagatgctttgtcagcccctcttggagcatctgctgattttgatgaggacgaactagaggcagaactggaagaactggagggagcagaattggaatctcagcttttcgagcctgttgcagctccacctgtgcattcagtgcaggttccaggcaccaggataccaactcgccctgctccacagaaagcattagctgaggaggatgagcttgcagccttgcaagctgaaatggcattgtgaacaggttcacaatgaagagaccaaatgtacaaatgattggctgggctctacggaatttcaacgagtgtagctacaatataatttccca

SEQ ID NO: 41957 - DNA, 299 bp, Oryza sativa
  Clone ID: uC-osroM202006b03b1
ctctggcggcatctggtcatgcacctcggccacggggcatttaaagcagtcgacggggtggaatggcctctgcagcggcacggattggactcggcgacggtggtatacttccggtcagtctctcgtccggatctacttccgacaaggctctcgtgcggatctagggccttgcagcggtaatcactggatctggggtcttcgcggctggatgccctctcctgcttactcggtgcggtggcaatcaccagatctggggcctctgcgcctggatttcgttgatgggagtttttgagcgagga

SEQ ID NO: 41958 - DNA, 403 bp, Oryza sativa
  Clone ID: uC-osroM202006b05b1
attttatttgttcgttcggttactgcaaaagaaagtgggcaacaaaatggccaacgcgaggaacgcggctgccgcgtcgccgccgccgccgtcgtcgtcttcttcgtattcctcgtcggcgtccgacggggagatcctccgatcgctgcaccgcctggcgagggatctggctgcggcggaggcgccggcgccgttcttggagacggtgttcgcggcggtgtccaggcgcgcgaagcttctcgacgcggtgttcgacgacctgcttcggtgcgggaggctgccgcggtcggcgtcgctgtgcctgcgcgaggagctgctcgtgctgcagcggttcatggcggtggtggccgactgctctgcgcgcagccggatgcggctgctacttgaggccgactagggtggc

SEQ ID NO: 41959 - DNA, 504 bp, Oryza sativa
  Clone ID: uC-osroM202006b09b1
ttttgaccatctcactagctaatcgctggtactggaagctgtagtagcagctggccaaaaatggcgccatttcttgttgtgttcgccgtcatggccgcggcttttgcgtcggcctccggctccggcgagctcaccccggacttctacagcgagacgtgcccgcaggcgctgacgaccatcaagctcgtcgtcggcgccgccatcttgaaggagccgaggatgggcgcgtccttggtccggatgcacttccatgactgcttcgtcaatggttgtgatggctccgttctgctggacgacaccgacgacatgatcggggagaagctggcgaagccgaacaacatgtcattgagagggttcgacgtgatcgacgccatcaaggtggcggtgaacacggcctgcttggggaatgttgtctcctgcgctgatatcttggcagttgctgctcgtgattcaaatcgcgcgctcggtggaagctcgtacgaggtgctcctgttgcggggcgac

SEQ ID NO: 41960 - DNA, 363 bp, Oryza sativa
  Clone ID: uC-osroM202006b12b1
tttctcaaatgtcattcgatatcaacaaatggccggaaattaacaaaaaaattggcgttaaaacccatgaaattgctaaggaatttaaaaatatccaacttcaccccttgcacttgattttggctctcttgctggatgaagaaggatttacttcaaatattatttccaaagccaatggaaattcaaaggattttgaacgcgctattaaaaaacgtgttactaaattaccttgtcaagatcctgctcctcctgagttgactttgcattcgtattgctagtgaggttttacagaacgctcaggaaattagtaaaaatgctggagattcacttattgctgctgataatttattacttgcttgtgct

SEQ ID NO: 41961 - DNA, 300 bp, Oryza sativa
  Clone ID: uC-osroM202006c05b1
gatgtgattcttgttttcttgatcatccatggcgcgggtgcggtgtggtctcgaacacctggagcggcggtacgcgttctacgcggcgtaccactccaacccggcgaacgtgctcgtccacgccgtgtgcgtgtggcccatcctcctcaccgtgatgctcccgctccggtacgcgccgccgctgccgctgctccgattctactgcccgttctgtcgtcagaacctccccgtgcagcttggcttccccgttgccgtcgcgctgggcgcgtactacgcgctcatggaccgccgtgcgggcgc

SEQ ID NO: 41962 - DNA, 281 bp, Oryza sativa
  Clone ID: uC-osroM202006c06b1
ccgtttatcacactagctagctatctgcttcccctgtcgatctgggatatatatgtggacgaaccctagctcgatcttgagtgattaagttggggatcaagctagagatcgagacgatgtcgtcgtggaacagcccgtactacgacacctcttcctacggcgccggatcaggaggcggcggcggcggcggcaggcggtcgttgtctcctgcgcgcggtgccggctacaagaaggagaccaagacttacgattaccagtgcttcacaagtcacaacaacaac

SEQ ID NO: 41963 - DNA, 519 bp, Oryza sativa
  Clone ID: uC-osroM202006c09b1
tttacttgcctccaaatttaggagttgattcatgttttgttttaccatccagggtggacaacccctgcatgtcgacaacatctatgaaccaatatgtttctcacactcagagcttcggattgccatcaaaccaagttgttctaggaagcatggatgaaggtagcagaaatgaaaatgctggtgaaagtgctagaggattcattaaaaggaaaaatgctgcagttgcaggaagttaccactgtgctaatggatttgcaaggtcaagctcttctcatgcatctctgaatcctacacataggccatgggatccttcttttgagtcaaatgttttgcctaacactgcatcatataacccatcagagtaccatagccagaccagttggccatctatggaaggatcttccattcccagtaatggctttaatttgatgggtgctcacccagaatcagcacaacatggtaattatgcatttccaactagtcacatcagccagtggtttcaacctactagcaatacat

SEQ ID NO: 41964 - DNA, 414 bp, Oryza sativa
  Clone ID: uC-osroM202006d03b1
gcttgaccgtctccaacgacgacctcgcgctcagtcggcaagttattcccgctgttgagggagctgacgctggtgtgctgcgatgggttcagcacgctaggcctcgccgccatcgccgagcggtgccggcatctccgtgtgctggatctgattgaagactatattgacgaggaggaggatgagctagtggattggatctccaagttcccggagtccaacacgtcgctggagtcacttgtgtttgattgtgttagtgtcccattcaactttgaggccctggaggcgcttgttgcacgctcaccagctatgcgccggttgcgaatgaatcaccatgtgacagtagagcaattgcgccgtctaatggcaagggcttcccagctcacacaccttggtactggtgcattcccgtctgag

SEQ ID NO: 41965 - DNA, 404 bp, Oryza sativa
  Clone ID: uC-osroM202006d05b1
cttgctctttctgctccgcccgcaatttcgccggcgccgtcgttgaactcctccccggccgcttcccttcatccaggttcccccatggcggactccggcgctcgcaggcagcctagcttcaccaaggtcgaccagctccgccctgggacccatggccacaaccttctcctcaaggtcgtcgactccaagatggtccttcagaggggcggaggccctcagggcaggcacatgcggattgccgagtgcctcgtcggcgatgaaaccggcattattgtcttcaccgcaaggaacgaccacggggatgtaatgaaagctggggctagtgttgaccctgggaatgcccagattgatatgttcaaggggtcgatgcggcttgcggtggacaagtgggggattgtgaaagc

SEQ ID NO: 41966 - DNA, 419 bp, Oryza sativa
  Clone ID: uC-osroM202006d10b1
acgcagcgcatgtgttgcgctcgcgggcgatgcgcaccatctccagcagcgccaggtcattgaccagcggggcggcggccgtgggctgatccagctgcgcggccagcgccagcagctcggccgggcagtcgcggcccggggtccaggccagacgacgcaccgggccctgcgcctcgagcacgacctggctgaagggcggcgccagcggctggggttcaggctccggttccggttccggctggggttccggttcaggctggggttccggttcaggctggggttccggttcaggctgcagcatcggatcatcgatgttatccacagcttgtccacaggagttgtccacagccggcggcagcgcatcggtctcggccaccggtgcgacagccggttcagcggcaggctccgtgacaggttct

SEQ ID NO: 41967 - DNA, 368 bp, Oryza sativa
  unsure (1)..(368): unsure at all n locations
  Clone ID: uC-osroM202006d11b1
atctgttttttcccccacccacaccacaagcggtgcnaatattaaaaacaagggtgggccttcaagatgttggaggagctgctcatcttcacgcgcggcggcctcatcctctggtcgtcatgccgggcgctaggcggcgccgccctcaagggctcgcccatcgacgccctcatccgcttctgcctcctcgaggagccgctctgccgacgccagctttttccaggacacctatgcgcttaagtggacctttaacaatgacctttgcctcttgttcgtcgccgtttaccaacgcatgcttcaccttctttacgtggactacctcctcgccgccctccgtaaggagttcttacagatttattgatcccagc

SEQ ID NO: 41968 - DNA, 387 bp, Oryza sativa
  Clone ID: uC-osroM202006d12b1
gatgacgcggcgctggcggcgaagggcggcggtgcggatgtgaaagagctgatggggccaacaaacgggaaggcgttccggcggctgatggcgctctgcgtccaccgcccgcccaagtacatccccgacttcctcgtccgcgacctcctccggaaatatttcgcggacaaaagagaggagaagatccggctgatcaaagagatcgtcaccgaggaacaagactcgcagcttaattcttctctccctcaagaaattttgatcatctggggggagttcgaccagatttttccttgggagaaagcacacaaagcgaaagagaagcttggggagaaggcgaccgtgaaaataatacccaacaccgggcacctggcgcaccacgaggatccc

SEQ ID NO: 41969 - DNA, 407 bp, Oryza sativa
  Clone ID: uC-osroM202006e01b1
ctgatgacaccattttccccgcgtcttgtcgcctggtgcgtttactcctcgggggggtcgccaccgccgtcgccggaggcgggacgggcgcctacacccgcgtgttcagcttccgcgactcgctcaccgaccccggcaatgcgctgcacctcccgtccaccggcggcggcggcggcccggccagccgccctccctacggtgagacctttttccgccgccccaccgggcgcgcctccgacggccgcctcgccgtcgacttcatcgtggaggcgctgcggttggggcacccggcgccgtacctcgctctcggtggcgagacggcggtcgagttccggcacggcgtgaacttcccccgtggcgggtcgaccgcgcctcccccggagttctaccagggccgtggtcttaag

SEQ ID NO: 41970 - DNA, 429 bp, Oryza sativa
  Clone ID: uC-osroM202006e02b1
gtttttgaagcaacagcagcagtcaagccaacccgggcggcgttcaagaagcaaccgaggcagcaaaaggaggaggagggaggactccactgttcgcttgtatcgtcttatgggggaagaggatatcagcaacgacagcaagagcagctgcggctgcgaggacggcacggtggaggctccggcggctgcggcgccgaaggagaacggccgagccgcggacccgcgcctccaggccatctccgacgccatccgcgtcgtcccgcacttccccaagccagggatcatgttcaacgacatcacggcgctgctgctccggcccgccgcgttcaaggacgccgtggacatgttcgtcgagcgctaccgcggcatgcgcatcgcggccgtcgcaggtattgaagccagaggattcatatttggcccaccgatcgc

SEQ ID NO: 41971 - DNA, 469 bp, Oryza sativa
  Clone ID: uC-osroM202006e05b1
atctattctcgccatctctcctgtctcctcgaatccggggcctttggaggctgctgctccctccctagcggcggctgctgctcttcctccccggcgtggtggcggttgctcccctccccgtcctggtggcatctgctacgcccccctccccggctgccccctcccctccccgacgtggagccgaaggcggctcctgctgcctctccccggtgtgggagcgtggcggcagcggcggcggttgcttccctcccggcgtggtggcagcagctgccccccctccccgacattgtgttgacggtggcttctactctcccttcccggcatggtgactgcggctgtggccgctgctttccttccccgcgtggtggtagcagtttgcccgttgctcctcctttccggctgcccctcatctcccccgtgtggggtccgaggcggtttcttgctgtctcttcccccgcgttggcgccct

SEQ ID NO: 41972 - DNA, 309 bp, Oryza sativa
  Clone ID: uC-osroM202006e08b1
tttctcccgcactctctcccgcgaaaagacttctgctctcttttaagatgttgggggtgttgatacactcgcgcgcggcggcgcggtgccagagatgaggaggatgttgcgttgcttcttcggcggcggtggcgactagacgggaggtgacgaggagaataatgcgtctgcggcggcggtggtgaagaacaagaaggcggtgaggcggatgctgagtgcgacagcgcggcttcagtcgttgtcgctggaggacctgttgtggacgctgccgcaatccgggctgtaggccttcactcttgcagagcttaa

SEQ ID NO: 41973 - DNA, 434 bp, Oryza sativa
  Clone ID: uC-osroM202006e09b1
ttttatccctgatttctcgtctgtccagaacgtggccaatttaaaaattggtgggtggttcacacagccagtcttgtttgcgccgctctgctctcaacaattgcgtgattgtgctctagttcatcccgagacgcctcgtggcgataccgcgttgttctgcctgctgtcctggcgtggctgcctgaagcttctttgcatccacgcatccagtgcatgcagtcctccaacgcaatagtgcaatagtttttaaggactggtagagggtttgtgcggccgccgacaacagcctacaccagcaacagtacattacagccccccagtcgccacataggcaagacctacccagcatgtaggacctggaccccctggtgcagatattcaatgtctcttgagacgttggagccctccaccagcacccttgatttgcccttggc

SEQ ID NO: 41974 - DNA, 155 bp, Oryza sativa
  Clone ID: uC-osroM202006f01b1
ctctgtccccatctctcataacttggggtgttctctataaatctactggggggtaccaaaggatacaactccagcttccaccggtcatcaacaaaggaccaatcgaaaatcagataacctgtcaccaacacctaataagcagcctaacactactt

SEQ ID NO: 41975 - DNA, 370 bp, Oryza sativa
  Clone ID: uC-osroM202006f02b1
cttttaagggttggtaatggtgggcggcgtgacggggacgttcacgaacaggtgcggcggcacggtgtggccgggggtgctgtcgaactcggggagctcggcgctggggacgacggggttcgcgctgggcgccggcgagacgcggtcgctggcggcgccggcggggtggtcggggaggttctgggcgcggacggtgtgcacgttcgacgacgacggcaagggcacttgcgcgacgggggactgcggctccggcgaggtggagtgccgaggagcgggtgcgacgccgccggcgacgctggtggagttcacgcttgtcagcggcggcggcggcgggaaggactactactacgtgagcctggtggacgggtac

SEQ ID NO: 41976 - DNA, 458 bp, Oryza sativa
  unsure (1)..(458): unsure at all n locations
  Clone ID: uC-osroM202006f03b1
ctcctctcttacctcacctggttctctccgccaccggcgccgccgcctccattcctccaccgccgccaccccaagacttccccccacctttatatagcggaccaccaacccatcgcctgcgcgtcctcccgagaaagagagagagagagagagatcccgacctcaacaatggcggccgcttcctccctccacgccgccccgcgggtgggatcctcctcctccttctcctcctcctcctccgctggccgcagatcagcctccgcggcgaggagcgtgcgcgtggcggcggcggccggatcgtgcgcggcgcggcgggcggtgggaaggatggaggcgcgggccgccgttgcatccaaggcggaatcgccggcgagcgcggcctccttcaagtctgacggtcatgaggtcttactgtatgaggctcttcgcgaggcctngataggagagatgaaagaaga

SEQ ID NO: 41977 - DNA, 374 bp, Oryza sativa
  Clone ID: uC-osroM202006f06b1
cattcacctccgccgccgccgtcgccgccgcatctgtccttctaaaaagccgcgcgcggtcgagcatgctgcgccggttaccccgcgcggcgctcgccgcctctcgcccgacgccgacgtcgacgacgcgtacggtgcagcagccgtcgccctcggtcggcagacgctcggccaccgagctaggatgggacacaccgacgacgtcgccgtcgccgagggccccgcgctcgggctcaccaagcccaacgccgacgagcccccgcaggtttcatttgctgctaaagacgtcgaattctccgaatggaagggagacattcccgcaatcccagtgacagagaatgatctggtcaaaggatcagacttcaaatttgaga

SEQ ID NO: 41978 - DNA, 452 bp, Oryza sativa
  unsure (1)..(452): unsure at all n locations
  Clone ID: uC-osroM202006f08b1
ttttggcttccccactctctcttcttcttgggggggtgggagctaccagcacagcgcaccaaggaagctgaggtgcgttgatttcttgatatcatggccaagaggcacctcttgttggtgacaacttgtttgtgggctctgtcatgtgccttgctgcttcatgcttcctctgatgggttcctgagagtcaacctcaacaagaagagattggacaaggaagatctcactgccgccaagttggcgcagcagggcaaccgtcttctgaagaccggcagttcagacagtgatcctgtccctctggtggactacctcaacacccagtactatggggtgattggcctcggctcaccgccgcagaacttcacggtgatatttgacactggaagctncaacctgtgggttccttcagcaaaatgctatttttcgatagcatgctacctccacagcagata

SEQ ID NO: 41979 - DNA, 482 bp, Oryza sativa
  Clone ID: uC-osroM202006f09b1
tttcagcaatcggcggcggcggcgacgcgggagaggcggtccggcgacgatggttcacgtcagcttctaccgcaactatggtaagacattcaagaagccacgtcgcccttacgagaaggagcgtcttgatgcagagctgaagctagtgggtgagtatggactgaggtgcaagcgtgagctgtggcgtgttcagtatgctttgagccgtatccgtaacaatgcaaggcacctgctcacacttgatgagaagaatccacgccgcatcttcgagggtgaggcactgcttcgccgcatgaaccgttatgggctccttgctgatgggcagaacaagcttgattatgtccttgccctcactgttgagaactttctcgcaaggcgtcttcagactcttgtcttcaaggctggcatggccaagtccatccaccatgctcgtgtcctgatcaggcaacgccacatcagggtcggcaggcaaaatgtcaaca

SEQ ID NO: 41980 - DNA, 421 bp, Oryza sativa
  Clone ID: uC-osroM202006f11b1
tttttccacccccaaatcgcctcgactagcggctgttgtgtttaaagcaggagaggggcggccgaagcggctgcggcgggggcgagatgagcgactcgttctgcccggactgcaagaagcacacggaggtggcgttcgaccactcggcgggggacacagtgtgcacggagtgcgggctcgtcctggaggcgcactccgtcgacgagacctccgagtggcggacgttcgccaacgagtccagggacaacgaccccgtccgtgtcgggggccctaccaacccgctcctcaccgacggcgggctctccaccgtcatcgccaagcccaacggggcccagggggaaggtcctctcctcctccctcggcaggtggcaaaaccgcgggttcaaccccgaccggttccttatactttgctttccgacca

SEQ ID NO: 41981 - DNA, 434 bp, Oryza sativa
  Clone ID: uC-osroM202006g03b1
ctttaatgtgctctccagggaggcgctcttctacgaccgtcatcttccccttcatcgccttcttcggcgcctttgccttcgtgctctaccctctcaggaatgtgatccaccccaccgcgctcgccgacaagctccttgcggcgctcggcccgagctttcttggccccgtcgccattctgaggatttggagcttttgcttgttctatgtcatggccgaactgtggggcagcgtcgtcatctcggtcctcttctggggcttcgctaaccagattactacagttgaggaagcaaaagaattctaccctctatttggtcttggggctaatattgcgctcatcttttctgggcgtactgtgaagtatttctcaaatctgcgcaagacattgggtccaggtattgacggatgggaggtgtctttgaaaggaatgatgagc

SEQ ID NO: 41982 - DNA, 494 bp, Oryza sativa
  Clone ID: uC-osroM202006g06b1
cgttgtgacgtctacctcggctacggctacgccatgggcggtcagacgatgccgttcatgcacggcatggggtacgtcgtgtcgtgggacgtcgcgacgtgggtgtccacggcggaggagatcctcgcgcgcaacgacacggaggggcccgaggacctcatggtcgggaagtggctcaacctcgccggacgcggccggaatcgctacgacctcaagccgcggatgtacgacctcagctgggacatggacaacttccggccggacaccgtcgccgtgcacatgctcaaggacaaccgccggtgggcggcggcgttcagctacttcaacgtcaccgccgggatcaacctgcaccacctctcaccatgatcgatcgatcgatcgatcacctcttcgatgatccataattggtggttgttaatttcttccccgtttgattaattctaattaactaatcggtcgacacattttttaacggggttaattcgattcgtgca

SEQ ID NO: 41983 - DNA, 372 bp, Oryza sativa
  Clone ID: uC-osroM202006g07b1
atgtgagcaagtgaaactgcaagtgagctaaggtgcaagaagagagaggtggagatggattggtacgcgtggctggcgaagaccgggttggcgccggcgctggcgtacgagtacggccgcctcttcaaccagaacgagctggagcgcggcgacgccgcgcacttcgaccacgacctcctcaagagcatgggcatcgccgtcgccaagcaccgcctcgagatcctcaagctcgccaagaaggactcctcctccgccgccgacgcaggcggtggcgactcctcgtcgtcgtcgtacgcgcagctgatcgcgcgcaaggccgggaggtgcatcgcgcggtgcgcgcggcggctggcgcgaccgcggggtgtcggt

SEQ ID NO: 41984 - DNA, 503 bp, Oryza sativa
  Clone ID: uC-osroM202006g08b1
gtttatgttgcaagtgacgtaatccaaaatgtggcaagtggcatacttcaagatgttgcaagtgatgtaattcaagatgggaataaggacttcgttggagaactatcagtgacattagttgatgccaggaagcttagctttgtcttattcgggaagactgatccatatgttgtcatgattcttggtgatcaagaaataaagagcaagaagaatagtcaaacaactgtaattgggcaaccaggcgaaccaatctggaatcaagactttcatatgctagttgcaaaccctcgcaaacagaagttgtgcattcaagtaaaggattcagttggtctaaccgatgtcactattggcactggagaggttgagttaggatcacttaaagacacagtacctacagacaaaattgtaactttatatggaggatggggcttacttgggaaacggtcaaaaggggaagtactcctttcgctcacatacaaagcatatgtcgaggacgaggaaga

SEQ ID NO: 41985 - DNA, 488 bp, Oryza sativa
  Clone ID: uC-osroM202006g09b1
tttttgctgtaggtctggagagtggagaggagggggaatcctactcagtcctcgccttcagatttcagaacacaggcaatcggccctagctgcaatccaacaagatgggcatgcctctgctgctgctgctgctgatcctcgtcgctgctggcccccaggcaggcagagctgcaaagccaatcccaaatctccagctcatgaccaaggagggcggcagttcaagaatcatccaggacgacatcataaaggcaatcaacaagcatcccaatgctggctggacggctgcacggaatccatactttgcaaactatactactgcgcaattcaaacatatccttggagtgaagccaacaccgcatagtgtgctaaatgatgtccctgtcaaaacttatccaagatcgctgatgcttccaaaggagtttgatgccaggtctgcatggtcacagtgtaacacaattgggaccatacttgatcagggtcactgtggc

SEQ ID NO: 41986 - DNA, 373 bp, Oryza sativa
  Clone ID: uC-osroM202006g11b1
atctaactgcgagtgattcaagaaaaaagaaagcgtgagctttcgatctcttcggagtggtttcttgttctttgaaaaagagggggattaatggcgacagccgggaaggtgatcaagtgcaaagcggcggtggcatgggaggccgggaagccgctgtcgatcgaggaggtggaggttgcgccgccgcaggccatggaggtccgcgtcaagatcctctacaccgccctctgccacaccgacgtctacttctgggaggccaaggggcaaacacctgttttccctaggatcttgggccatgaagctggaggcattgtggagagtgtgggagaggggtgtgaccgaactcgtgccgggcgaccatgttctcccggtg

SEQ ID NO: 41987 - DNA, 418 bp, Oryza sativa
  unsure (1)..(418): unsure at all n locations
  Clone ID: uC-osroM202006h02b1
ccattctcttataccagagcctccgccgcctcagatganccttttaagatccaccggggcagcctcaagttcaagcttcacgccacgtggggaaagctgccgaattacgcggtgattgagcagaggtacttcgattgcgagatgttccctgcaaacgatgaccacccctcgcacgacgtagcgagggggcagaggttcgtcaaggaggtgtatgagacgctgcgagcgagtccgcagtggaacgagactgctctgatcatcacctatgatgagcatggtggattctatgaccatgtgcctacgccgggtgtcggggttccacagcctgatggaattgttggccctgatccttactactttaagtttgatcggcttggagggggcgtgccttcttttcttattctcaccatggatcgag

SEQ ID NO: 41988 - DNA, 336 bp, Oryza sativa
  Clone ID: uC-osroM202006h03b1
cgctttgcatcgcacttgtagctctcgaccccctcgtctaatgcatactctcgctggggtcaaaccaaaatcgcaactggcgaagattaagctcgggatcaatgggttcgggaggctcgtgaggctcgatgccagggtggccctgcagagcgaccaccatcagctcgctacctgcaaccacccctctatcaccaccgactacatgacatacatgttcaagtatggcactgtgcactgccagtggcagcaccatgagggtatggtgaaggacttcaagacccttctcttaccccagaaagaggtcaccgcgttccgctgtatgaaccctgtggcgat

SEQ ID NO: 41989 - DNA, 504 bp, Oryza sativa
  Clone ID: uC-osroM202006h04b1
attcacagaagctgctgagctcttgagtgtatggtgggtggaaatcattggcaatgtggacagcaggatgctctccccgaactcaacttatgctgcagttttggtgttcaagatagctgaggagttctaccagctggatactatagatgcaacagtcaacctcggaggctcgaaatcaagtcgcgaggttgctctcactcgatcccgtcgtcgtcctgaagaagagatcagtgcagtactgttccctcggacaagagctgacggctggatggaggtggagctaggcgagttctttaacgaggaaggtgaagatggacacgtgaacatcagaatttttggtaaaggacccaattggaagacaggtcttattgtgctgggcattgagattagaattaagaaatctgccagatgatcgagcttctggatcaatgatgcgtcctggtgagactgaaatgtataagatttcccgaccccgaagctttgtcgcttaagtggcattcgctt

SEQ ID NO: 41990 - DNA, 435 bp, Oryza sativa
  Clone ID: uC-osroM202006h08b1
cattaagaaagggtcaacaatctggttagatgtccattggatacacttgcagggggaattgctgcagtaggaactgcttctcggcccctcttgcatcaagaatctggtgatccttatgcaaaggcttatgcaaaactgactgcactttttgaacaaagaatggactcatatgctaatgctgatgccagggtttcactcgaacatattgcagtgaaacaaggacatagtaatgtgacgacacttacaccaagtgccattgctattgaggcattgctaaagatggagagctttcttactgagaaggcaatgatcagaaactaaccacttttgggtgggtaaaagcacatcaacaaacaaaaactcttgtttgttctggtggatttatcgcatatacctaaggcgggtttcttagtatagcatgaacttgttagtcac

SEQ ID NO: 41991 - DNA, 387 bp, Oryza sativa
  Clone ID: uC-osroM202006h09b1
gtttgtgtccctgtctcccctccttcctcctctgctttcccttaaactcttgcgcggtctcacaagagagagagagcgccagactctccccaggggaggattcagccatgaagggggccaaatccaagggcgccgccaagcccgacgccaagttggctgtgaagagtaagggcgcggagaagcccgccgccaagggcaggaaggggaaggccggcaaggaccccaacaagcccaagagggctccctccgctttcttcgtttttatggaggagttccgtaaggagttcaaggagaagaaccccaagaataaatctgtcgctgctgtaggaaaagcacccggtgataggtggaaatccctgaccgaagcggacaaggcttcctatgtag

SEQ ID NO: 41992 - DNA, 416 bp, Oryza sativa
  Clone ID: uC-osroM202006h10b1
tccaatctcgccgcaatccccatcgccgccggtggtaaagctaaaatttcggggggggcacctcctcggcgacgaccgagaccgcgagcgatttcggagggctcgatcgatggcggctgagggagagaagaagatgatcaccctgaagagctccgaccgggaggagttccaggtggaggaggcggtggcgatggagtcgcagacgatccgccacatgatcgaggacgactgcgccgacaacggcatcccgctccccaacgtcaactccaagatcctcttcaaggtcatcgagtactgcaacaagcacgtgcacgccgcggccgccccggcctccaagggcgccgacgaccccgcgttcgtcgtcggagacgtgccgccgtcctccggcgaggacctcaagaactgggacgcccact

SEQ ID NO: 41993 - DNA, 54 bp, Oryza sativa
  Clone ID: uC-osroM202007a01b1
tttcctgatcccaagcgaataaaccacaggggaattctataaactcctagagag

SEQ ID NO: 41994 - DNA, 105 bp, Oryza sativa
  Clone ID: uC-osroM202007a03b1
ttttttgcagccaccgcatgtgtgcctcccggggcgcttttatatatgtaagggggcttgcaacacatggcgtgtcggttaatcttcgcatattattcggctcac

SEQ ID NO: 41995 - DNA, 361 bp, Oryza sativa
  Clone ID: uC-osroM202007a04b1
aacttcatgtggggtttttttttccatggcgtgttccaccgagcgcgcaacgacgggctgggcggggtgtaccccaccttgttccagctccggcgatccgtcgtgtcgctggggtgcacctcgtcgtgcatgccagagcaaggtgttggtgttggtgctgaagccatggacacatcatcttcagacaatgctagttgtcaaaacaaaccccttcccccgactgcgtcttcaggcggcggatgagggtggcctccggctaactgcagcatgaaggagcagccgccgctgcggacgctccggtcgctgacgatgcggacgactagcaccggcgacctgaggaagagcatgatggaagacatgc

SEQ ID NO: 41996 - DNA, 332 bp, Oryza sativa
  Clone ID: uC-osroM202007a06b1
ttttatttcgttccgacgcgagtaattccttgcacggtttgaaactaggggggctagggaacctcgggcgccgccgtgccggagatcgcctttcgccgccgacacccggatctccgccgccgccggtcgccccaggttatcccgctcccgcagtcaccatcccgtcttctccgccagtcgcctcacgcccggcctggacgccccggaatccattgtcggtctcgccccgccgactgccgttgacgccactggctgaaggtgtgaatatgtcggacagagcgttgaaagatctgaatctagctcactcagcaaagctggagaaaaccaagact

SEQ ID NO: 41997 - DNA, 501 bp, Oryza sativa
  Clone ID: uC-osroM202007a07b1
tttaccttctcctccggctcttcttcaggagggaatcttatattctcctggggcccaccaccaccaccgtagcaatggcgggcaacgggccgatcaacaaggaggacccgctcaactggggcgcggcggcggccgagatggccggcagccacctcgacgaggtgaagcgcatggtggcgcagttccgcgagccgctggtcaagatccagggcgccaccctccgcgtcggccaggtggccgccgtcgcccaggccaaggacgccgccggcgtcgccgtcgagctcgacgaggaggcccgcccccgcgtcaaggccagcagcgagtggatcctcaactgcatcgcccacggcggcgacatctacggcgtcaccaccggcttcggcggcacctcccaccgccgcaccaaggacggccccgccctccaagtcgagctcctcaggcatctcaacgccggaatcttcggcactggctccgatggccacacgctgccgtcggagacgg

SEQ ID NO: 41998 - DNA, 487 bp, Oryza sativa
  Clone ID: uC-osroM202007a09b1
tctttgagcgagcgcaagtgttcactgcgtgggggtcctataaatatctgtggggggttctagatctgtagcttattagcggccatgtgcggcggagcaatcatctccgggttcatcccggcgtcggccgctgaggcggcggcggctgcggcggccaaaaagcagcagggcaggagggtcacgggcgacgtgctgtggccggggatgctgcggaaggggaaggcggcggctgcggaagaggactttgaggccgacttccgcgagttcgagcgtggcatgagcgaccaccaggcggaggggggcggcagcgaggaggaggaggaccactaccacatggtcgaggcggtccccccgccagcggcggcgaggttagtcgtccatgccgcgggcaatggggggcccccaactgcagatgggatgctgactacaaagcttgtccaacatgatggacctactgctagatcagcatagctcaagaggaagaatc

SEQ ID NO: 41999 - DNA, 459 bp, Oryza sativa
  Clone ID: uC-osroM202007a11b1
tttttatcctctctctctgtctccgtccccaagggagcgtttgacgatcccgtgggctgcacagttcaaaacggggatcggtagtgttctgcatcagtgatgggctggagatttgcgttgttactgttacatgttcttctgtgccttgtcaatggcgtctcctgtggccgcacgagctcttacgtgcgtacggagtacccatcgactgatatacctctagaaagcgaatggtttgcggttccaaacggctacaatgcgccacagcaggttcatatcactcaaggtgactataatggaaaagctgttatagtataatgggttactgtagcagaacctgggacaagtgaggtgctctatggtaaaaatgagcaccagtatgatcagagagtggaaggaacagtaacaaattataccttttacgactataaatctggatatattcaccattgcctctgtgat

SEQ ID NO: 42000 - DNA, 481 bp, Oryza sativa
  Clone ID: uC-osroM202007b01b1
acccaattcttgatcactcttctgtgtcgttcttgcacattcttgggcggcgaagcgagcttacctgcaacctgcaagatcgagctagctagctagcaatttatctaggttggtgagagcaggaagagatcgatcaagggctgaggggtgatggagagcatggagggccatggaggagggcggctggtggtgacggagctgtgccacatcaaggagctcgtgaggcagctggagggacacctgggtggctccggctcccccgacctctgcaagcacctggcctggcagatcttctccgtcaccgagcgctccatgagcatgatcaggtccgggcacttcgacgggcaccgcaagcgctccagcgccgctgtcgtcgacggtgacctcgactcggcgactcccaggcccctcagcgacgtcttcgacttgcctttcatggccaccatgaagaggaagacgtccccgggaacaagaggcatcc

SEQ ID NO: 42001 - DNA, 207 bp, Oryza sativa
  Clone ID: uC-osroM202007b02b1
gtcaactcgacacagtgtgttcgctggcttgcgtggggcctactttgggggatttttgggacgactaaggttagcggcccaaggccggtcccggacggaaagggcagcaaagacggtcgagcgcccatagggccaataggcaagagtgcactgggaaaagatggacgcacgccacttgagcgtgacatgacaacatcatcggacttg

SEQ ID NO: 42002 - DNA, 224 bp, Oryza sativa
  Clone ID: uC-osroM202007b03b1
tggcgcccgtgcgtgcccctcccctgtttcccggtctccgccaccacgcgcgctttttcttctccaccgcatatacccccgcagagtggtgttgagttccacagagagtgagagagagcgcgcatggctctggctagggttagggttttctccttgccgcctccgcgtgtcgcgatgttcgccccgccatctttctccccgtagatcccgcctccggcgggggt

SEQ ID NO: 42003 - DNA, 503 bp, Oryza sativa
  unsure (1)..(503): unsure at all n locations
  Clone ID: uC-osroM202007b04b1
acgccttctgtggagagggagaccacgagatcatcggcgatggctctgatccggcaatggggccgcggcctcgccctcgccgctctgctcgcgctccacctcgccctcgccgcggcacagtcgcctgcggccgcgccggcgcagcccaccccaaccccagtgcccacggcgccggccaagtcaccgcccgcgccggccacgcctgctcccaccgtcactcccactcctcccgttgcaccggccaaggcgccgcctgtcgcgcccgccgtcgcgcctgtcacgccgccgccaccgtcacctaagaaagcacctccaccgccggtngacgccccctgcgggatcaccttctccggagacacccccgccgttgtcgtcacggtctaaaaccccggctccggttatgcctgcgtcgacgccctcgacggtggctgcaccggccgaaagctccgcagggttacccccagcgacgacaccaccggcagtggtcgaagcgcccgcggagc

SEQ ID NO: 42004 - DNA, 510 bp, Oryza sativa
  Clone ID: uC-osroM202007b05b1
cgcaagcgcaagcccagccgcctcgtcgtgttcgcgttcgtcgcgcgggtccgacctccaaagccgccggtacccttcccgtcttcgtcgtcgccgcgcacgcagatcgcgaaccagcccgcgcgccgcgcagcagcgccgcggagaggaaaggagagctccgccgcgcaccccccgccaccatctcgtagggagagatggggctcacgttcacgaagctgttcagccgcctcttcgcgaagaaagagatgaggattctcatggtcgggctcgatgcagccggtaagaccaccatcctctacaagctcaagcttggcgagatcgtcacgaccatccccaccatcggatttaatgttgaaaccgtggaatacaagaacatcagcttcactgtttgggatgtcggcggccaggacaagatcaggcccctgtggaggcactatttccagaacacacagggactcatctctgctgtggacagcaatgataggagcgtgttgttgaggccagaga

SEQ ID NO: 42005 - DNA, 456 bp, Oryza sativa
  Clone ID: uC-osroM202007b08b1
gttttagcttccaccagcgcgaagcggcggggggggggcttgatggcgcgcggcgtgtctgcagcggccaagggcggcgcgggcggcaagaagaagggctccgtctcgttcgtgatcgactgctccaagcccgtggaggacaagatcatggagatcgcgtcgctggagaagttcctgcaggagcgcatcaaggtcgccggcggcaaggccgggaacctcggcgactccgtcaccgtcacgcgcgacaagaccaaggtcaccgtcacctccgacggggccttctccaagaggtatctgaagtacttgaccaagaagtacttgaagaagcacaatgtgcgggactggctacgtgttattgcggctaacatggaccgcaatgtctatgagctcagatacttcaacattgctgagaacgagggccaggaggaagactaaagtgttttccacatatatctt

SEQ ID NO: 42006 - DNA, 442 bp, Oryza sativa
  Clone ID: uC-osroM202007b09b1
tttctagatcgcgagcggccgacctccggggttttggtggtgtgttatcgagactgagattatgcactaataacgctcgcaaggaatagcacaaatgaaatgatacatagctggcacaaagtgttgtcttgcagattgcatcatagaaacattctggatccagcaagcatacttttaccctatgtactcttgtgtaaaatatggatcctctttagctaatcaaattcaacctcaacgagaagggaacatccccctgagaatccacagcaaggacctatgtgtgtaaaaaggtacaaaattgtctatctgaaacaaggacaaagcgatgactaatttctgtgggttttatcgtcggatatgccgatcttaaagcacgcccaatgattatacaagtggaggaaaacggcctttacataagtttagtaggagtcagcaaccttta

SEQ ID NO: 42007 - DNA, 407 bp, Oryza sativa
  Clone ID: uC-osroM202007b10b1
ctagatcgcgagcggccgcccatcatggggggagctttaaaaaaagttgggggggcaaaaaacgaatttcattagtttttttagtattaaaaataaacgaacaaaaacagaggaccagcctcctcgccgcggaaaggaaaggagagctccgaaaagaaagggggggaccaccaaaaggggggagacggggcaaaccccaaaaatgcaagggaaaaaccccctcctcccatttggagccaccaaagggcaaaaaaccccccaaaaaggggggaacaaaaagaaaaccccaaaaagggaaaaaaagcaaaatgggggcaacaaaaagaaaaaaagggccaaatggggaaaaaaaaaaaagcacccgagggggggcccccaaaaaacgagaaaaaaggggggacaagaac

SEQ ID NO: 42008 - DNA, 464 bp, Oryza sativa
  Clone ID: uC-osroM202007b11b1
tttcttttcttcttcttcttcttcttcttcttggcttcttctatctacttggcaaaccatcaacgtgcccttctatttccttcttcccttcctccgagggcttctgatccggagagacagagatgattgggagcagaggcggcggcggtggcgcggcgccaaggccgaggcggcggagcgacccgggcgacagccgcgacctctccgtggccaccaccacggagtcgtacaactccgagaggtccgtggggagcggcggcggccgcgggaccgccttcctagacgccttacggtcatgcttcgtcggggggaggcgcacgctcgctccccggagacctcgccgttgtccgacgacttacatccctcacaacaggtatcacagtcgataagctcacaaggttctagcagtgggagcaattttgagatgcggagatcaatgaaaggactgtataatccaatgcata

SEQ ID NO: 42009 - DNA, 88 bp, Oryza sativa
  Clone ID: uC-osroM202007b12b1
ttcctctcacctcgcaatcacatcctcttcgcttctcttatccatcgcatgtaccaccgagcgtgcaaggaggggggggggggggggg

SEQ ID NO: 42010 - DNA, 428 bp, Oryza sativa
  Clone ID: uC-osroM202007c02b1
gtggcgcccgggcgtgccccgccgcggtttcccgggggcgccaccacgcgcgtcttttcttagcggccgacctacactgttttggtagatactaaaacattccaggaactggcaggtagctagggctctgcggcgcaatgtgtatcacacattgcttacacccttgctgggctttaccaagctgagcatggaagtaaatgccctttgatcctaatgttcaggcatcttcccatgctgagagcacgtcatgcatgacatacttaccgacaccctagatgacttgagaggtctctgctttacaccctgaaatagatcgctgttatgttcacataagacaggatcgatgggcactggttggcgttgcaagacatgaactagacagcctacttatgcttggatgacttggaccgctagcagatcttgacagg

SEQ ID NO: 42011 - DNA, 366 bp, Oryza sativa
  Clone ID: uC-osroM202007c05b1
tttccttctctatctagaattctagatctccaggtgaatttgaaatctctatcggggtcaaaggagaatgaaccatcaaatcaatatatacaatgagcttgatcagcatgatggaggcgaacctgccgacggggttccggttccaccccattgacgaggagctcgtggttgactacctataccacaagctctccggcggcagcggcggcggcgccggcgagagatacagaggcgtggacatggcggacgaaaacctctacaagtgcaagccgtgggagctctcagacgccgctcggtagtgcgccacgcagtgtaacttctgcagtctgcacgaccgcacgaactccacggtgcatggcaccaacc

SEQ ID NO: 42012 - DNA, 305 bp, Oryza sativa
  Clone ID: uC-osroM202007c06b1
ccaatcctggaccaaaccttgacacccccgcctgcggctacggtggcgaatgggaagcacgtgttcctgccgatgcccaagatggcatacggtaagtcagacgcgttcaccgacaccatcccgcgcgcttcgaacccgtcgccatactcaacggaggctgcgacggccgccgacgaggcggatatcgcggaggcctttatggtgacggcggcagcgtaccagatgcaaaccgaatgcgagagcgacacatactgcgagttcgtcacgatcacagctgaccccgctgaccgagtaccttatgcaca

SEQ ID NO: 42013 - DNA, 464 bp, Oryza sativa
  Clone ID: uC-osroM202007c09b1
tgttttattagcaccaaccccgtctccttgggcattcctgcgccgctagggcgttctagaagctctcctcctcctcccatggcggcgacgatcgtgtccgtcaaggcgcgccagatcttcgacagcaggggcaaccccaccgtcgaggtcgatgtgtgctgctcagatggaacctttgcaagggctgcagttcccagtggtgcatcaactggtgtctatgaagctctcgaattgagggacggcggatctgattacttgggaaagggtgcctccaaggctgccgacaatgtgaactcggttattgccccagctctgattggcaaggaccctacgtcacaggctgagcttgataacttcatggttcagcagcttgatggaaccaaaaatgagctggggtggtgcaagcagaagcttggtgctaatgcaatcctggctgtgtcactggccatttgcaaaggtggagc

SEQ ID NO: 42014 - DNA, 474 bp, Oryza sativa
  unsure (1)..(474): unsure at all n locations
  Clone ID: uC-osroM202007c10b1
tcttctcgctcttccccctccgccgccgccgggggggatctgcaacagcaggcgagcgacatgggagggtttgtcaagacccagaagacccatgcctacttcaagcgtttccaagtcaagttcaagagacggaggcagggcaagactgactacagggccaggattaggctcaccaaccaagataagaacaagtacaacacaccgaagtaccgctttgttgtgagatttacaaacaaagatatcacagctcaaattgtctatgctaccattgcgggtgatatcgtgatggctgctgcctactcccatgagctgcctcgttatggtcttgaagttggtctcaccaactatgcggcagcttactgcactggcttgcttctggtcgccgtgtgctcagctccgtggtttggccaggagtacgagggcaatgttgaggccatgnggaggacttctatgttgaaccagctgatgaaagga

SEQ ID NO: 42015 - DNA, 485 bp, Oryza sativa
  unsure (1)..(485): unsure at all n locations
  Clone ID: uC-osroM202007c11b1
tcttttattacgtgctgcagggaagacattgggtattggatacggagcgggggctaccatttgcttggcagacgtgagcatggtgaggcaggtgttatcggaccggacggggatgtaccctaagaacgtgtggaacccatacttcgcacgactactcggcaaggggcttgtgctcaccgacggcgatgagtggaagcgccaccgcaaagtagtccacccggcatttaacatggacaagctcaagatgatgactgtgactatgtccgattgtgcccaatctatgatttccgagtgggaatccgagttggggacaaagggcgatatagtggagatcgagctgagccgacgattcgaggagcttaccgctgatgtgatctcgcacacagcattcgggagcagctataaggaggggatgcaagtgttcttggacaaagagagcttcaatttcttgccttctccaccttncttagcatccaaatcccggg

SEQ ID NO: 42016 - DNA, 429 bp, Oryza sativa
  Clone ID: uC-osroM202007d02b1
tcttgttctttctacccgtctccattggagtgtacttctctaacccggagtggggttcaagaacggacatgctgctagagaggtcctctcggacgcggatggcgagcctcagcaccgccccggcggcgctgttagtggcggcgcttctgctctcgtcgtctccctcacccgcggcagcggccgctggacgaggaggagaactcatgatgaatcattctgatggtggctatccttataaccgcactctagaccatatttttgtgcaatatgcatctgctgtgtatacctctgacttaacctcacttttcacgtggacatgcccaaggtgtcacggtcacacaaagggcatcgagattattcagataattgtcgatgtggagaaccgattacaggctctcgttggagacgcccctgatccacaatccatac

SEQ ID NO: 42017 - DNA, 467 bp, Oryza sativa
  Clone ID: uC-osroM202007d04b1
acttcgtgaagaaaatggctcattgaggagaatttttacgagttcgggggcagctgcagccacttctactggggctccggacagatccgctcgtggagtgcgcagaaacacacctcaagataacgcattgaatgtctcattccacaatggatctggtgggggcacctgacagggcatgcacccaaatgcgttggactcaatgacagaggatccaaggcaaacatgtaggcaggggaccggtctttctttgctgtctaaacatggctccctgccaacgggatccgcatggaaaggaagttactgataattctgagaaagaaactgaaacaaaaaggaggttagaggatgtacacatgcggaatgaattgcttcagcatcagcttattgaactaaatgtcagcatagagaggatttcaactaacatgggaaagctccacaatgaggtgagtgtgatggaggccaagttg

SEQ ID NO: 42018 - DNA, 350 bp, Oryza sativa
  Clone ID: uC-osroM202007d05b1
ttttcactgctggcgctgacttcatcctggtggggtccatttacaagccgtgcggtctgatccagctgcacaccatgcagtccggctcaatggccactggtgtcatgcaccggtggcctgtcgtgcactgtgtaggagggcaccacaggctttcacatgggtgccttagaccctgacatgctgaaccaggcagatgctgatgccattgcagcaacagtgcacccgcgtcacacaggtttactgcatcccctggttccaggatacggtgaaggcctgcatgaacccggacctcagatgtagccagcccgccaggaagtggcaggccacgctggaggaggacaccaaggggt

SEQ ID NO: 42019 - DNA, 456 bp, Oryza sativa
  Clone ID: uC-osroM202007d06b1
ttttctagatcgcgagcggccgcccctcaggttgtttttttataaaaactaagcggggcatagaataacaaccaccatgtgccgagcaatttacatgttgggacccaaagacaacaatactatgaggatgcctgaactacctcccactggataagaccactaagcctgcaaatcagacaaataacctcaccagcatcagcagggcacctcctccatcctatccaccggattgcatatgccggggcttctccagtcgaatgacgcttcgcacggattcccagcctgcgccttccattcacaatctgggggagttccacaggaaaggcttctgttatccacatgctgaacatccaatccattcaaccaataaccatatgacacctgctcgatggaatatttgaacaagatataccaacctgctgatatgtatgctgctaaatccatgggtacaacata

SEQ ID NO: 42020 - DNA, 493 bp, Oryza sativa
  Clone ID: uC-osroM202007d09b1
tctaaatttcttatcctcccctctctaggggggcctgcctaactcctggtgagctaccactaccagcagctatgctggcatggaatcgagctgctcccaacaggtaactcatcaacatgaacctactccaacctctatgctcactctgaattctcaaggtggagatctcatcaggtagatggccatggaagcaccatatgaggagagggcgcctctgcttcatccccaacctgaaccttcacggggggatgcacattcacagtatacaggtgatggatcggcggacgtcaacaaccagcctgctctcaagcgcaacacggggaattgtagagcatgcttcatgatcctaggtgtacaattcagggagaatctggcttactttgggatctccaagaacctggtgacctacctcaccaaggtgctggacgaaagcacagagaacgccacgaggaattcctctgcttgggcgtgcgcctgctacctcactccactc

SEQ ID NO: 42021 - DNA, 518 bp, Oryza sativa
  Clone ID: uC-osroM202007d10b1
atcactatattgtaagcggggacgcccgggggtaccccgccgcaatacccccggcgacgccaccacgcgctcttcactggtgaagctgactacaaccagcggggatccattttcatccctggggctagaaccgagctccaccccacgcagataccccaccagtcccccttggggtcatcccaccgtaacacgccgagacctgtcgaatgagggcaccacatgccccgcaccaagctgacgtgctacaccttacaagctcacccacgcacaagctgctgccactgcatcaacagcgccgttggccagacaggaggactgcagccggacatgccaggcgacggcgatggctcgcatgacccaggaccaccggtaggccagcccgccgagcaagtgggaggcccgtgctggaggaggccgtcaaggggtgcacagcagcacccgccaagaaggcatctgtggcaacacccgggcaggccaagcaggcagccatgtccccctaagctacacccaactggatg

SEQ ID NO: 42022 - DNA, 453 bp, Oryza sativa
  Clone ID: uC-osroM202007e02b1
gccccgccccaagtatcccgggcgacgccaccacgcgcgtcttatatcgcgagcgtcactccttcctttgtgttcttttttaacccacgggggggtgttgcagcggcggcggcaggatggcggattcgactgcgaggacggtgaaggacgtgaaccctcatgagttcggcaaggcctactccgcccacctcaagcgctgcggcaagatggagctccctgagtgggttgacatcgtgaagactgggaggttcaaggagctccctccttatgatccggactggtactacacgagggctgcctcgattgcaaggaagatctacctgaggcagggtattggtgtaggtggcttccacaagatctatggcggccgccagaggagatgggtcacgtaccccgcacttctgcaagagcagcggcgctatctcacgcaacatccttcagcagctgcagaag

SEQ ID NO: 42023 - DNA, 499 bp, Oryza sativa
  Clone ID: uC-osroM202007e08b1
tttgatctagctggtgaatcaagggttgtgggagctgttaacaatgcagtgggatctgaccttagcaaaggatcaagctcagcttatctatctgctgcatctaatgctgcacaagcggcggcagctgctgctagcgaaagttcaaacctaccacctgagctggatgaattcggcagagatatcaatatgcagaagcgaatggatcttaagcgtagggaagaagacaggaggcgaagaaaaattcgatcagaatctaaaaggttgtcatctgaagggaggagtgcaaataatgaacatatcgaaggggaactaagcactgatgagagtgatagtgagagcagtgcctatctgtccagccgtgatgagttgctcaagactgctgatcttgtattcagtgatgctgccgaggaatactcaagccttagaattgttaaggacaagtttgaaggacggacaactcagtatcctctggcttaccgagatgctcatgtagctctga

SEQ ID NO: 42024 - DNA, 483 bp, Oryza sativa
  Clone ID: uC-osroM202007e10b1
tctttcttgttcaattcaatcgagcagcatctaggtgcattgtgaccgatcggtctgtatagatggtggtggccggcaagaagcaaggacggcattcttttttctgcatcatcatcgtcgtcttcgtcttcttcttgttcagtagtgcagctgggtcatcatcagcgcccacagggtgaggaccctctcatcggcatcaaagcagcagcagcatgaggaggaggaataatgagaaagggcccgtggacggagcaggaggacgcgcagttggtttggctcgtgcggctgctgggcgaacggcggtgggatttcttagcaaaggtgtcaggtttgcgcggcgccgggtgatgagcatatgcgtgcgtgcatctaatctatcgattaattgctgatgatgtccatcagatggatggatgcatgcatatgccgtacatagtagatttgatgatagtaactgacataaatataatgtatgcgtgcgat

SEQ ID NO: 42025 - DNA, 491 bp, Oryza sativa
  Clone ID: uC-osroM202007e11b1
tttttcacacatagagcttgtgagagcttcttgtttctctctctcttgtccttgtggtagctggtgcttaaaggaggaggaggtgaggaggaggcgcaatgtctgagcagccattgccgcagcctcggagcagcatgcgggaggcgctggagaaggaggacaaggagaaggcggcggcggccaaggagaaggccgccgtccccaagaacggcggcaacgggggaggaggcaagaacggcggcggtaacggcggcggcaacggtggcgccggcgcccagcccggggaggagacgacgagggagattcaggcggtgagggaggcgtaccgaggagagccggcggcgccggcgtacgtgatgccggaggagccgccggccatggtggagctcgtcgggtggtacctctacggcttctgctcctacttcatcacccacctgctgctccccgtgctgttcccggccatcatcacccaggtcgccttccccgcctcc

SEQ ID NO: 42026 - DNA, 489 bp, Oryza sativa
  Clone ID: uC-osroM202007e12b1
tcctgcccctgatcctcatcatcaggaacgggttgatgtatgcgctgacatagccgtgaggttatctctatcctgatgcagcggcatgtcttggctgatgggaaggtcaggactgacaagacctaccctgctggtttcatggatgtgatttccattccaaagactggtgagaactacaggcttctctatgacaccaagggtcgcttccgccttcagtccgtcaaggatgaggatgccaagttcaagctttgcaaagttcggtctgtccagtttggacagaagggcattccctatctgaacacctatgatggacgcaccatccgctacccggaccctttgattaaggctaacgacacaatcaagatttgatcttgagaccaacaagattgttgacttactcaagtttgatgtgggcaatgtcgctatggtcacaggagggaggaacactggtcgtgctggagtaattaagaacagggagaagcacagggc

SEQ ID NO: 42027 - DNA, 465 bp, Oryza sativa
  Clone ID: uC-osroM202007f01b1
aagctgcacggctgcatgcaccgccccggaatccccggggacgccccacgcgtttttcatacacctggccgacataaaccccaagggaggattacaaaaaaggatggggataccaaccgctgcctctgcctcatcctgacaggttacacactcctcatgaacctccaccatctgctcccgcgatgccgcatcatactaccagtggcccgccgcgctcaactccatcgtccgccacgagaggctacatcaggccgtggcgcatgctgccgtggctgtgggagttgtacgacgcaggccatggaccagcaccaagctctgcttccagagccgctagctctcactcctattgaaaaactacaccagagcatattgagaaaacgctaggcaaacatatcagcaacacgagccaatataatgtctcatatacagcataatttggagtacttgagtaaccatccacacttt

SEQ ID NO: 42028 - DNA, 440 bp, Oryza sativa
  Clone ID: uC-osroM202007f04b1
ttttcatatgagcgcaatcttgacgcattgagggttctttaaaggaatggttggcagtaaagcaatgcatccattggcgttaccaccactttattcggggacaacaaggatgttatgaatattgagcactatcacctgactgactgatgtgaatcaagtgcacctgatccgaggatatcagagaggtatgcactagatgcctcccagttaaaggctctctcattaggcttgaacaagaagaggcctgttctaattatccagagtcctgctgggacgggcaatacagtcttgctcacagatctcattgtacgtgctgtccaacaaggtgtgaacgtccttgtaacagctcctagcaatgccgcagtcgataacatgtatgaaaggttgtcaaacactaacttgaacattgtgcgagttggaaaccctgctcgatatcacca

SEQ ID NO: 42029 - DNA, 393 bp, Oryza sativa
  Clone ID: uC-osroM202007f05b1
ctttccctgctcccatctcaccacgccactccggtcctaccccaatctcaagtgggagaaggcaacagacaccctcgccgccgcggcggacccatccggcggatggcaaactcaaagcggctcccgtactccacggtcggcggcggcgacggcaggaggacgagacaggccgactgacctacctgcacgcggaaggggacagcaacgactcggaggaggtggcccgcgccaccagcgcgctctgactggaacacgcgccggagcaccaccactggcaccaccacagcgtcgctgggcggagcacgttcgcgtttctcgccggggaccacggccgcacgtactatgccctggcggacccgacgcctggcagccccgatacggtccggttcctgc

SEQ ID NO: 42030 - DNA, 401 bp, Oryza sativa
  Clone ID: uC-osroM202007f07b1
ttctccacctcgccgccatttgatcgagcgcctgattgcacatgatggatgggggcctcagcctcggcctcggcctcgcctcgcagggcagtctcacctcctccaccaccaccacctcctcccccggcgccggatcatcctccccgtgggccgccgcgctcaactccatcgtcggcgacgtgaggcgggatcaggccgcggcgcatgctgccgcggcggtgggggttggggttgggggcgaggagatgtaccaggggtggttgcacacctggcaggaccactcggtggaaatactccaccagtgcatattgagaaagcatgagcaagagccgaggctcaccggggttgacttcatcgaccatatccaacaggacttggattatggaggtgctgatccacat

SEQ ID NO: 42031 - DNA, 504 bp, Oryza sativa
  Clone ID: uC-osroM202007f08b1
tcttctgctgctctgcgagttatcggtgttcatccagcatcgagagcggtggcagtggtactaggagtctaggacgagtggtgggtactggttgtactggtggtacggcggtttcagcggcggagttctcgcgggattgtctcgttcgtctgatccggcgctgggggacggcggttggtttctttttcttctgctgcttcgcgagcgggtgtgagagatcggttccatgcgggggtcgctgctgctggcctcgggccgtcagggtttgcaagcggaatctactcaactatgacagattagcctcaaaataaatgatggcagctgaggttaatcaaacttttttcgcgtggtcacaaggagaaccaactgaacgggacggctctcaaggtgtatctgtgtgccagaaaattgatcatggttccatctcctttggaagattcgaattggagtctctatcatgggaaaagtggtcagtattttctgatgacaagcgtcatgaagaat

SEQ ID NO: 42032 - DNA, 450 bp, Oryza sativa
  Clone ID: uC-osroM202007f09b1
ttcctgttgtttagtctctacctactgatgggaaccttcccagacgcgaggcgcttcgcgcagaggagagcctcggttaggctcatgatgaatgcatggaagatgccttggggtatacacttccctctatctgcaatcagttgattacatcagcaaattaccagcaccaacttgtaatgattcggtccttcaacaaaagcaacagatggaaaaagcgggggctttctgtcctgccgatagtgcataaattcgcatctcgcccaacgcctggtaaagcgtctattcttaatgatggatccgctgctgttgcagttggtatcatcgaacttggccacgggctttgtacaaatttgaagcatatggcagcgttcgcacttggacagttttgcactgatcgaaggcaacaactgttacagagtgcgagatttattcaagcagatacactaagtg

SEQ ID NO: 42033 - DNA, 369 bp, Oryza sativa
  Clone ID: uC-osroM202007f11b1
tctttttgttccgccgcttcccctctctctctaggtctcgttgagaattcgccgggagggcgcagggaattttattaggagaaatcccctttttgtatccgtttctccggatccgcacacctcctgttaatccgccgattcttctttgatttgttcatattcgttttttttatttttttccctttgtttgcctttttattcgttcgattgtggggggagggaagatgtttggtcgaccggatttcttggtggtttgcctggatctggcgtcctagaggccctcgtgcccgaatcccgattcgattcgcctcggcgcggcgccgctcgcctcgacgggtttggatctcggggtgggattagaggggaggg

SEQ ID NO: 42034 - DNA, 475 bp, Oryza sativa
  Clone ID: uC-osroM202007g02b1
tatttctcctatccgttctagcgagggaccaaatttctcaccagatttcctgccgattttcccctcatgagccagccgactccctcttccagcgtgatttccagaatccctctgccttgttgagagatcatcgcaggtttcgtttgcatttgcggggcggccatatatggctgcagtgtggagcggttgcagcacgagcttcagccaagaacttcccccacaccctcgtggaagaaggggcggcgatggggcaatgaattcatccatggagcggaggagcggtcagagacgccaccacccggcatgcggaagctgcaaggaccgtggtcgccttcgccagagggctcgtgcgcgtgtgcagggcggcggctccatgcgttcttgaacccgacgtcaccggcaaggaggaggtcggcgtggcggcttggggcatggacgatgagccgtcggtcgctgatggtcaccggaggcactg

SEQ ID NO: 42035 - DNA, 440 bp, Oryza sativa
  Clone ID: uC-osroM202007g05b1
gcgttctctcgccgccgcaaccaccgccgactcgggggagcatgacccgcagccgccggcgccggcgccatggactccgtcgcgtcatgggggctgaccccgctcgacgcggacgacccgctcgtacacgacctactcaagcggcagaagcggcggcagagtagcggcatacagctcatcgactcggagaactttacctgcttcgccgtgatggaggccctcggctgcgcgctcaccaacaagtactccgaggggatgcccggagcgcgctactacggcggtaacgacgtcatcgacgagatcgagaacctgtgccgcgaccgcgccctcgccgagttccagctcgacgccgcgctaggaagcgtaaacgtgcagccctactccgggtcgccggccaacttggccgcctacacggagctgctcacgccgacgaccgcata

SEQ ID NO: 42036 - DNA, 499 bp, Oryza sativa
  Clone ID: uC-osroM202007g07b1
gacatctacaccacatacaatacaagagctactactacagctcaccatcaccggagcaagagccaagaagacgacgacgacgacgagctagcagcagcattgcaaccgacggcaatggaggagcagcagcaggtggaggtggaggtggaggtgccgttctacttcgtgtgccccatctcgctgcagatcatgcgcgacccggtgacgctccccaccggcatcacctacgaccgcgacggaatcgagcgatggctcctcaccggcggcacctgcccggtcaccaagcagcccgtgccgcccgactgcgaccccacgcccaaccacaccctgcgccgcctgattcagatatggtgcgccctccacgccgaccatggttgtgtactcgtccccacccccaagcacccaggcgaccgcgcccgcgttgccgacctcgtctaccgactacgagccgtcacgagctccgatgcccttctagacgcgctgcgcgagctcagggacg

SEQ ID NO: 42037 - DNA, 500 bp, Oryza sativa
  unsure (1)..(500): unsure at all n locations
  Clone ID: uC-osroM202007g11b1
tttgaaagggtcctcctttgtttaaagcgtgggttaagtattgcaaatgccgctcaacagatggctaatgtaacaaggggaagtagcggatctgtcgcgctatttatcgaaattttgaacaagtatttgtacttcttcgagaaaggaattccagagatcacgaacactgtaatccaggatttgattgaattgattaggacagagaagcaaagtgagaacactgtagctgatccatcgacagaggccttctttgcaagcactttacgttacattgaattccagaagcagaaaggtgggagcataggtgaaaaatatgagcaaataaaaactacctgattgtgcactaagtcaaaacaagaacagcgtcacgacgtgttgtttttgtctcgagtcatatttgcgngaagttcagtgaaatacaagccattggtctcagctgcctctggcctaaggatctttgcatcctgtgtgatttgcgcatcttacgctcaaagcggggg

SEQ ID NO: 42038 - DNA, 342 bp, Oryza sativa
  Clone ID: uC-osroM202007h01b1
tttttcttctcctccggctcttgttattatgtaatcttgtaattctcctggggcgcaccacacaccaccgcaacattggggggcaacgggccgatcaacaaggaggacccgctcaactggggcgcggccggggccgagatagcctgctcccacctccacgaggagaaacacatggtgggccaattgctctaggctgtgcacaaggacccagaagggccacactccgagttgccacatggcgcccgcgaccaagaccacgacgacttcgccgtctgcggctggctctgcgcagacggccgcccccgcgtcaacggcagcagcgactggatcctcacctgcatc

SEQ ID NO: 42039 - DNA, 451 bp, Oryza sativa
  unsure (1)..(451): unsure at all n locations
  Clone ID: uC-osroM202007h06b1
tttggtgcaatacgtcaccggctacctgtgccgctccttggctctcctcttgctcactctcgtcctccacaaggtggcgaggaaggcgaccggtaatggcgccggcaagccgaggcttccgccggggccgtggcggctgccggtcatcggcaacctccaccaggtcgcgatgggcggcccgctcgtccaccgcaccatggccgacctggcgcgccggcacgacgcgccgctcatgtcgctcaggctcggcgagcttcgcgtcgtcgtcgcctcgtccgccgacgctgccagggagatcaccaagacgcacgacgtcgcgttcgcgacgcggccgtggagctccaccatccgcgtcatgatgagcgacggcgtcgggctggtgttcgcgccctacggcgcgctgtggcggcagctccgcaagatcgccgtggtggagctcctcagncgcgcg

SEQ ID NO: 42040 - DNA, 447 bp, Oryza sativa
  Clone ID: uC-osroM202007h09b1
tcttcgattgcgcatggagctggacaagaggtgtaatgtgatatgcctgcgcggcttccccacaagtgggagttttctgaagaagcaaatcatcaaatggaatccttccatcttccaacaatttgacatggtcttccctgatggcatattcccagctggagggaaatcagagatagaaagcatatttcccccaccctactttgagtggtttcagttcaacaaggacttcactgaatacacaaatctggatgagtgcatttcatacctgcgtgattacatggtgaaaaatggaccttttgatggcctgcttggattctcccagggtgcaactctttctgctcttttgataggttaccaagcacagggcaaagtactgaatgatcatccaccaatcaagttcatggtctcaatagctgggagcaagttcaaggacccagcatatgcaat

SEQ ID NO: 42041 - DNA, 485 bp, Oryza sativa
  Clone ID: uC-osroM202007h10b1
tttatcaagcaacaacttgctgctatagcgggacactttagaagttgaacagggtgaaaaacgaaagagtgcgggaatttgttaatgttcagtcacaaattgatcaaatatgtggtgagattgctggcactacggaggtgggtgagaaggtggcaacgccacaagttaatgaggatgatttgacacttgagaggcttgaagaatttcgttcacaactacaggagctcgaaaaagagaagagcaataggttggagaaggttcttgattatgtgagcatgatacataatctctgtactgtcttagggatggattttcttagcacagtgactgaagttcatcccagtttggatgactctattggtgacaactgcaagagcattagcaatgatacactgtcaaaacttgacaagactgtagccacacttaatgaagacaaaaagtcaagactaagcatgcttcaagagcttgctggtcaactctacgat

SEQ ID NO: 42042 - DNA, 495 bp, Oryza sativa
  Clone ID: uC-osroM202007h11b1
tctgtctcgcctcgcctcgccctccctctctttgttcttttctaatggcggtacagggccagtacccttccagtctcctcttccacgatagaggtgagccggagaggacgaaggagatggacctgcccaggccgcagatgttcgccggagtctcgccggaggtgtactttcccagcggaggagcgagtgggattaatcggaggaataagcgctcgagggaggccattgccatggcgccgccgccggccaaggaggagttggtcaatctgttcacgctccagccgcagcagtctacgtcgtttgtcaacatggcgcagctccacaacagggtatcggcgtcgccgtcccgcgcgccggcggcactcgtgtccactggccttcgcctggcattggatgagcagcagcagcagcagcagcaacaacaagagagcaaacgcctgaaagccttgtgctactcgtcgtcgcccatgccgttcgtctcgttctcgacgagct

SEQ ID NO: 42043 - DNA, 399 bp, Oryza sativa
  Clone ID: uC-osroM202007h12b1
cttgctacagtaaattccccacccttgacccctttatactcctcgatggctgcgacctcctccccagcggcgggagggagaggggccgtgccgcgtgccccaaccgaagcacgccagcggacgcgtggcgcgtgccgggcatcttgcaccgtccccagctgtagagaggcgacccaacttggagacggcccctggaacaccaggcgcaccagcgacagcggaagcgacgaggttacggctcgcaactgctatggggactcggatactagccgaggcgacagcagccgcgcagatccaacccgtggcggaagccgcggcgcggatcacctccgcggcagccgctacgacctggtagaggaccaatgtgacggcagccgagcggatccaacccacggtggc

SEQ ID NO: 42044 - DNA, 277 bp, Oryza sativa
  Clone ID: uC-osroM202008a04b1
gtcagccaactcgcttgacattgtggggactgtatactgtaggtttaattgtcagaagctaaagctaccagagggctgtgggcacgaatatcaaatgcattatggatcaattggttgccggaggggcaactttgggatatgcacaggctggtaaggataagcgaggcattgcttgcatcggcaatggaagctttcatgtgacggcgcaagaagtgtcgacaatgctttattgggggcagaaaagcatcattttttctcatcaaccaatgaagggtac

SEQ ID NO: 42045 - DNA, 350 bp, Oryza sativa
  Clone ID: uC-osroM202008a05b1
atttattcgcgcgcggtgcgtagtagcgagaagagaagggggggagggcaaagcgatggctccgatgaagctgtacgggtcgacgctgtcgtggaacgtgacgaggtgcgtggcggtgctggaggaggcggcgccgagtacgagatcgtgccgctcgatttctccaaaggcgagcacaaggcccccgaccacctcgccaggaacccctttggtcaggtgccggctttgcaagatggtgacttgttcctctgggaatcacgtgcaatttgcaagtatgtatgccgcaagaacaaaccagagctgttgaaggatggcgaacctcaaggagtcagcaatggtggatgtgtggc

SEQ ID NO: 42046 - DNA, 355 bp, Oryza sativa
  Clone ID: uC-osroM202008a06b1
ccttattctcaaaaaccaaaaaccaaaacctctcctgtggcctcttcttctctaccctcttcttcgacctcctccatccgagaggcagcaagccagcaactgcacgagcaaccacccgtagtcagtgacctagcggcggagggagatcggccggcggcgagcgacgacgatgaagtacgtgctggtgacgggcggggtggtgagcggcctcgggaagggggtgacggcgagcagcatcggcgtcgtgctcaaggactgcggcctccgcgtcacctccatcaagatcgatccttacctcaacaccgatgctggaaccatgtctccattcgagcacggtgaagtgtttgttttggac

SEQ ID NO: 42047 - DNA, 341 bp, Oryza sativa
  Clone ID: uC-osroM202008a07b1
gtttaggaagcaaggaattagccatggcttctgtttcgccgttactgcttctcctcttgtgcagctaccactctgtagttgctcatgcaggagatggacagagttacaaggttcttgagctgttctgaggccgtctgctccgagcgaaatgcgatttcgtcgtcgttgagtggaaccacggtggcgttgaaccaccggcacgggccatgctcgccggtgccgtcgtccaagaagaggccgaccgaagaggagctgctcaaacgcgaccagctccgagccgagcacatccagcggaagttcgccatgaacgccgccgtcgatggcgccggcgatctccagca

SEQ ID NO: 42048 - DNA, 343 bp, Oryza sativa
  Clone ID: uC-osroM202008a09b1
tttaaatccgcgatcaaaaacaccaagcatagcgtggttagcccacagctgggttgctgctgtccccagcaccacccaaaaactgcagcaccaaaatgaggcatcaacagcaggatcgtaggctcaaattgagtatgagttctttgggccttatggaccagcagttctgttattggcactgccatgcgtggtcctaggactggtgtacgcctgcaactcggagggctgtctgcagctgtcgcagctttttcagctcccgctgtctcagtggtccctggcactgctgccaggtttcccatcaaaccaaccgctgtacagtcatgaggcgatggcagctgtggtg

SEQ ID NO: 42049 - DNA, 335 bp, Oryza sativa
  Clone ID: uC-osroM202008b03b1
cttcttcttcgccgccgccgccaccttccaccccttcagccgccactccaatccaaggaggatgagtgaagaggacaccaatgctgctgctgggcagcccaggcgcgcccctaagctccgagaggatcctgtcctccttgtcgaggagatcagtagctgcacatccgtggcatgatcttgagatcggccctggtgctcctgctgtcttcaacgttgttgttgagatcaccaagggaagcaaagtgaaatatgagcttgacaagaaaactggactgattaaggtcgaccgtgtcctatactcatcagttgtgtatccccataattatggtttcatt

SEQ ID NO: 42050 - DNA, 340 bp, Oryza sativa
  Clone ID: uC-osroM202008b04b1
ctacgacatttgcttcaggactctcaagctgaccacacctagctttggggatttgaaccatttgatttctgccaccatgagtggagtcacatgctgcctaaggttccctggtcagttgaatctgacctccgtaagctggcagtgaaccttatcccctttccccgtctccacttcttcatggtcggattcgccccgctgacatcacgtggctcccagcagtaccgtgcccttactgttcctgagctcacacagcagatgtgggatgccaagaacatgatgtgcgctgctgatcctcgccatggccgttacctcaccgcctctgccatgttccgtggaaaga

SEQ ID NO: 42051 - DNA, 364 bp, Oryza sativa
  Clone ID: uC-osroM202008b05b1
ccccactcccggctgcagtgttttgcggcgatggccgacgctccgccgccggtgctgacgctgcaggtgaagaagggccgccgcggcggggagacccggcagtggcgggcgggcgccgtgctccgcgtcggccgcgtcgccacggcaacgacatcgccgtgcgcgacgccggggcgtcgcagcgccacctttccatcgagttcctcccgccgccggcctcgcggtgggccgtctccgacgtgggatcctccaacggcaccctcctcaacggctcccccctcgtgcccaccgtcccctccccgctctccgacggcgatgtcatcaagatcggggagtccagcatgctcgtggtctccatcgcgcc

SEQ ID NO: 42052 - DNA, 364 bp, Oryza sativa
  Clone ID: uC-osroM202008b06b1
ctccgcgtgagcggcagtttgtgttcactgcgttcttcttctcgatttatctttcttggtttcttgatctgtagcttattagcggccatgtgcggcggagcaatcatctccgggttcatcccgccgtcggccgctgcggcggcgcggctgcggcggccaagaagcagcagggcaggagggtcacggccgacgtgctgtggccggggatgctgcggaaggggaaggcggcggcggcggaggaggactttgaggccgacttccgcgagttcgagcgtggcatgagcgacgacgaggcggaggggggcggcggcgaggaggaggaggacgacgacgacgtggtcgtggtggtccccccgccggcggc

SEQ ID NO: 42053 - DNA, 262 bp, Oryza sativa
  Clone ID: uC-osroM202008b07b1
tcttatgatcgtgagcggccgacctactatcggtggtttttggacgattgtttttagcgggctaatgctgatcccgttcgcggaaggtggctatgctggtggagcgcacaagccgaacaaaggcaatacgacctgggaaaagcacgccgaacgaagttgggcgcgaacccgaagccggcgccgtcctctgggcccgccggttgaactagcgggagctttggcgcagggccggttcggttgatgtcgtttacgcggaggatga

SEQ ID NO: 42054 - DNA, 349 bp, Oryza sativa
  Clone ID: uC-osroM202008b10b1
ttcttttccttctgttctctcaaccctttgttcatcttcttgttcctcctcttgtctcgtctcgatggccgggattggtccgatcaggcaggactgggagccggtggtggtgcggaagaaggcgcaccgccgccgccaagaaggatgagaaggccgttaacgccgtccgccgtttcggcgccgagatcgagaccatgaagaagtataacgctggaacgaacaaggcggcgtcaagtggcacatccctcaacaccaagcggttggatgacgacaccgagagccttgcccatgagcgtgtctcaagtgacctgaagaaaaacctcatgcaagcaaggctggacaagaagat

SEQ ID NO: 42055 - DNA, 345 bp, Oryza sativa
  Clone ID: uC-osroM202008c04b1
ggtgttcacccccacgcagctgctcgccatggtgctctccaacctcaaggggatcgccgagggcaatctcaacgccgcggtcttcgattgctgcattggcatcccggcgtatttcactgatctgccgaagggctgtcgccgatgccgccgccatcgcgggcctccgcccgctgcgcctgttccatgagacgaccgccacggcgctggcttatggaatttacaagaccgatctcccggagaaggagtggttgaatgtggcgttcatcgatgtcgggcatgctagcatgcaggttagcatcgtcgggtacaagaaagggcagcttaacatgctctcgcatgcgtatg

SEQ ID NO: 42056 - DNA, 348 bp, Oryza sativa
  Clone ID: uC-osroM202008c05b1
gttattgtgatccatgctcagcgcctgcagcaacagctacagactcaaccagggtctcttccttttgatgagatcctatactgcaacattgggaatccccagtctcttggtcagaagccagttacatcttcagggaggttattgctctttgtgatcatccatgcttgttggaaaaggaggaaaccaaatcattgttcagtgctgatgccatttctcgagcaacaacaattcttgcctcgattcctggaagagcaactggagcatacagccacagccagggcatcaaagggctgcgtgatgcaattgctgctggaattgcatcacgtgacggataccctgcaaatgcag

SEQ ID NO: 42057 - DNA, 335 bp, Oryza sativa
  Clone ID: uC-osroM202008c06b1
actcccaggtcaacaaggccaaaagggccagtgagtggctagcttaattagctaagctcatagtcatagcaatggctggagccgtgctggtgaggagaatggtggtggtggttgccattccgccttggtggcgcccggcgaggtggcggcgcagctgacgccgacgtactacgacggcagctgcccgagcctgcagtccatcgtgaggtcggccatggcggccgccgtgcagcaagagccccgcatgggcgcctccatcctccgcctcttcttccacgactgcttcgtcaatgggtgcgacgcgtcggtgctgctggacgactcgtcgacgatca

SEQ ID NO: 42058 - DNA, 339 bp, Oryza sativa
  Clone ID: uC-osroM202008c07b1
tttttctatagctaagctctgagctccatggccatgaagtgcttcttcctcttcttcaccttcctcggggccttcttccccggcgccgccgtcggcgccgggctgaaggtcgggttctacaaagacgtgcccgtcggcggagcgcctggtgcagcaggcggtggccaccgcgttcaagaacaacagcggcgtcgcccccggcctcatccggctgcacttccatgactgttttgtcagaggctgcgacgcctcggttttgatcgacgggaacgacaccgtgaagaccgcgccaccaaacaaccccagcctccggggattcgaggtgatcgacgccgtcaa

SEQ ID NO: 42059 - DNA, 335 bp, Oryza sativa
  Clone ID: uC-osroM202008c08b1
gtcggtcatgcttgacacggacggcccagagttgcattgtggtgaacatgagcgaagcctccatcttcctcgaggagaacggcactgttattctcacccctgaccaggggcaggaggtcttcacaagtgctgccaattaacttcgctgggctagctaaggctgtgaagccaggcgacacaatattcggtgggcaatacttgttcacaggcagtgagactacttcagtttggttagaggtttctcaaattaaaggagatgatgtggtctgtgtgataaaaaacacagcaactctggctgggtcgctcttcacattgcattgctcgcagattcacat

SEQ ID NO: 42060 - DNA, 56 bp, Oryza sativa
  Clone ID: uC-osroM202008c09b1
ttttaatatttagcaccaacccagaagtgattcatgcaggcttttatcgctagaac

SEQ ID NO: 42061 - DNA, 344 bp, Oryza sativa
  Clone ID: uC-osroM202008c11b1
cttatgctttggttaattagctgagagagaaattaagagagagatgagttgcagcagcagcaacagcagcgcccatggcttcttgtggctgatgctcgtttatgcgttctgtgcagctgttcactcagcaagcagcgagaactgatccagcagaagtggctgcactgaacacgatcctggggagatggggcctgcgggcgtcgccggcgtggaacatcagcggcgagccctgcagcggcgtcgccatcgacgagaccggcgtcgacaacaaccccaacatcaacccggccatcaagtgcgactgctccttcaacgccggcaccgtctgccacatcatcagactg

SEQ ID NO: 42062 - DNA, 349 bp, Oryza sativa
  Clone ID: uC-osroM202008c12b1
tcgctgctcctctccctcttccaccttcctcccgccggaacttgtcgaaacctgggacgtgagccacggaggagggggaggagaaccccgtcgtcaccgaccgatctccccgtgcggcgccgggcgggggagcggagcgggagcctcgaccgagccgatccggacaggggccaccagatacgccccgcgcgagcgccggcgccgagcgcccaggcggcgttagatcccgccgcccggcccccccacccttccccgtggcatgcaaagggatcagaggcccacggctatagagtgatacatatatcctggggctgtgccttacgggcctccggtcctgcttagttagagg

SEQ ID NO: 42063 - DNA, 345 bp, Oryza sativa
  Clone ID: uC-osroM202008d01b1
gttattttgagaaaccatggagaccgcgcatctagcctacgtgctcctcttcctcgtcaccgccgtcctcctcttccatctccggcgaggcggccggtcagctccggcgaagctcacgacggcgcacgcccgcacccgaaccccgtcctgggcaacaccgtcgagttcatccgcaaccggcgccgcttcttcgactggtacaccgacctgctgcgcgcgtcgccgtcgggcgccatcgaggcgtggggcccgttcggcgccggccacgcggtgaccacggcgtgcccggccgccgtcgaacacctcctgcgcggcaacttcggcaactatgtcaggggggcgagc

SEQ ID NO: 42064 - DNA, 345 bp, Oryza sativa
  Clone ID: uC-osroM202008d02b1
gtttgttgccgcccttttttttttttttttgaaacaagctaaggtgtgacataacatcttattcgttgtaattgtcagcaaggtagccataggaagtgcattatgactcttactcctaatataccacaatagctggtgagtttgccatatttaatgataatttatgttatagtcaataggaaatctttggtgcaataaaagctgtgcaagctgaagcaatgttgtcggctcatggtgtgctgatctccaaggtgtaagattcaccatgtaggtgcctttgacttctccacaagaatgatcctaccgttccactcagtctcatcacaagcacgaatcgctgcatca

SEQ ID NO: 42065 - DNA, 347 bp, Oryza sativa
  Clone ID: uC-osroM202008d03b1
ccctttcaccgctccctctccctctccgtgcctggccgcgcggccgccttcaatttcgctctggtccaggagacctaccccggggacccctactccgaggcggcggcggaggtcatccccacgtactcgcctactccgcctccggctccgtcgccgccgaggtcgtgtacgccaactacggcaacaccaaggactacgagtacctcgcctcccgcggcgtggacgtcgccgggaaggtcgcgctcgtgcgctacggaaacctgcactgcgaggacatggtgcggaacgcccgtgccgcgggcgccgccgccgcgatcgtctacaccgacgccaaggactttggcggg

SEQ ID NO: 42066 - DNA, 342 bp, Oryza sativa
  unsure (1)..(342): unsure at all n locations
  Clone ID: uC-osroM202008d05b1
cttgttcagcagcgtctcgccatcgtctccccgctctccggcgaccagccgctgtacaacgcggaccggaccatcgtcgtcgtggccaatggagagatctacaaccacaagaagatcaggaagcgttcgcctccaagcacacgttcagcaccggcagcgactgcgaggtcatcatcccgctgtatgaggagtacggcgaggacttcgtcgacatgctggacggcgtgttcgccttcgtcctctacgacacccgcaccaagacgtacatggccgcccgcgacgccatcggngtcaaccccctctacatcggcaggggcagcgacggcgccgtctggatatcgt

SEQ ID NO: 42067 - DNA, 283 bp, Oryza sativa
  Clone ID: uC-osroM202008d06b1
gtctggtaggtgcgagtgctgcggcttcacggaggagtgcacttcgcggtacatcgcggtggtgcgggaggagtacatggggcggtgggagtgcggtctttgtgcggaggccgtgggcgacgagccgccgcgccggcgccgggaaggccaccattaccacggcggaggcgctcgaccggcacgttgcgttcgcgcgctccgtcgtgccgtgcgcggggggcgccgtggcggaggacgacctcgtcgtcgccgtttcgaggctgttccgacggtgacttgactc

SEQ ID NO: 42068 - DNA, 342 bp, Oryza sativa
  Clone ID: uC-osroM202008d08b1
tgtttcagtttttctaaagctactttctgaaaatgatcaggcttttgacattctctactgcataaccttcaagttgatggatcagcaatggcttgacatgcatgccacttacatggacttcaacggtcatgaagtccacacgacgtcagctagaaagggagctcttgcttgaagatattcagcggattgaggacatgccatcatacaagcttttggcccgctagctagtaactgaaccataacatggctacgtgctgcaaggcttgagttgcataagggttgcaactagtgcccacaaacagtgtgaattccaaaacgcagatgcacttgtttcctctcaag

SEQ ID NO: 42069 - DNA, 338 bp, Oryza sativa
  Clone ID: uC-osroM202008d09b1
catcgcgccctcctccgccgtcgctcgccgccgttcgttttcgccgccaccgccgccgccatgagggagtgcatctcgatccacatcgggcaggccggtatccaggtcgggaacgcgtgctgagctctattgcctggagcatggcatccagcctgatggacagatgcccggtgacaagaccgttgggggaggtgatgatgcttttaacaccttgttcagtgagactggtgctgggaagcatgtcccccgtgctgtcttcgtcgatcttgagcctaccgtgattgatgaggagaggactggtgactaccgccagctcttacaccctgagcagctcatca

SEQ ID NO: 42070 - DNA, 340 bp, Oryza sativa
  unsure (1)..(340): unsure at all n locations
  Clone ID: uC-osroM202008d10b1
tcgtagagcgggtctagtttcataaagcgaatcgngataaacttcttctacgagttcttgaggagaaacagccgcggaccatcttatgctgctaccatacctcatgcctccacactggaggggaatggtctaccaagtctgatagtagcagcagctgtataaagctagagatgagatctccatctgtacatatcacttcatgccgacaccgctaacctgaaggtggcagttgatgttggagcacctcatggccagccagccagttgcaaatcttgggagagccaacagggagtgtgcatttttgtctgtaaagccttctgttgagctgctccgtgttgtt

SEQ ID NO: 42071 - DNA, 339 bp, Oryza sativa
  Clone ID: uC-osroM202008d11b1
ttttatctctactaatcagccatgagctcaatggggctaattatactatcatgcatgcttctcctttctaattctggcagaacaactacaggtgcagagctaggtgacactcttggcaagggcggaacatcaccgacggcgagaggctcgtctccgccggcggctcattcacgctgggcttcttctcgccggcgtcgtcttcgtcgtcgagcaccagccggagatacctcgggatatggttctccgtctccgacgacgtcgtctgctgggtcgccaaccgcgaccgccctctcacggacacctccggcgtgctggtgatcaccgacgcggggagcctcc

SEQ ID NO: 42072 - DNA, 345 bp, Oryza sativa
  Clone ID: uC-osroM202008e02b1
gtatccccgttcggtttattcgcgtttacttcgtttcttgggaaggcacttccttcctcttcctaggaaggcttgaggagccaagaggaagaggagagcaatgggggaagctgccggcgaccgcgcctgagccgcctccacagcgtcagggagcgcatcggcgactccctctccgcccaccccaatgagctcgtcgccgtcttcaccaggctggttaacctcggaaagggaatgcttcaggcccaccagatcattgctgagtacaacaacgcaatctctgaggctgatcgtgagaagctgaaggacggtgcttttgaggatgtcctgaggagtgcacaggagggg

SEQ ID NO: 42073 - DNA, 340 bp, Oryza sativa
  Clone ID: uC-osroM202008e03b1
ctctctcatctcctctctctctctctctctcttgtttctctctctctttctctctctcactagacccatctctagaaagataaaggagctatgaaagaaagctctaaaaaaaggccatgagaccttaaagattgacctgagatttgcacaggaaatttgcaacaacaacaacacaacgagatatatcacctcgatatatatatctgttgcaattgcaagaaaaattcttttctccccttgcaattattctgtgctcatctcaatcaagctagcatgctgagtagaggaggggagttgaagagctcctccttggtgcagcagatggtgtgggttggcacgg

SEQ ID NO: 42074 - DNA, 345 bp, Oryza sativa
  Clone ID: uC-osroM202008e04b1
cttcttcctccccacccacccccaaatccacctcgccgtcgccgccgcgaaaccctaggcagccatagccatggctgcggccatcctcctccgccgcgtcccccccgcgcgggcccaggccacgggctcatcgcggcgcgctcgatctcggactccacggcgccgctcaccatcgagacctcggtccccttcacctcccacatcgtcgacccgccctcgcgcgacgtcaccaccaccccggccgagctcctcaccttcttccgcgacatgtccgtgatgcgccggatggagatcgccgcggattccctctataaggccaagctcatccgcgggttctgccacctc

SEQ ID NO: 42075 - DNA, 359 bp, Oryza sativa
  Clone ID: uC-osroM202008e05b1
tctagaacgcgagcggtttgttctttatgggttcgctgttttaaccactagtaagtatatattccagggtaaaacaggtaaaacctgtgatacaaagcagtcacataactgaaaaagcgcacgatagtttgtgctactaacagtaaaccaggacagaacacatccaacacgatgacgacgaggtcatgggggtttcgacgatagcaatactggcagtacgaattcgaggtgccgcacaacggcgcaccacattcacttcagcagggttttaacgatggatttgacattgagcttcttgaggtcagtgtaagactgaccacagccaacgaacatgactggagctacagatatataaacca

SEQ ID NO: 42076 - DNA, 344 bp, Oryza sativa
  Clone ID: uC-osroM202008e06b1
cttatttactcccaggtcaacaaggccaaaagggccagtgagtggctagcttaattagctaagctcatagtcatagcaatggctggagccgtgctggtgaggagaatggtggtggtggttgccatgccgccttggtggcgcccggcgaggtggcggcgcagctgacgccgacgtactacgacggcagctgcccgagcctgcagtccatcgtgaggtcggccatggcggccgccgtgcagcaagagccccgcatgggcgcctccatcctgcgcctcttattccacgactgcttcgtcaatgggtgcgacgcgtcggtgctgctggacgactcgtagacaatcacc

SEQ ID NO: 42077 - DNA, 339 bp, Oryza sativa
  Clone ID: uC-osroM202008e07b1
cacggacgagaacctggggtcggtgtcggtggggctcctgtacacgtcgttcacggcgttctcggtggtgggctcgccggtggtgcggcggatggggtccaggcgcgcgctcgtgctgcacctccggctacctcctcttcatcgccgccaacctcgtcccctcctggtacacaatggtgccagcctccctgtatctgggttttactgcatcgatcatctgggttgggcagggtacatatctcacgtctgctgccctcagtcatgcaagagacaataatttgcctgaaggccaaactttggggaacttcaatggagagttctggggaatgtttgctagca

SEQ ID NO: 42078 - DNA, 338 bp, Oryza sativa
  Clone ID: uC-osroM202008e08b1
ctctgcaggccgccggcgggtggggaggaggccggcggggagctcctcctgcgtgatcgcgagctccgcggtcggacacgtcgccgaggtcgccgcgtaccgcctcatcttctcaactcaccactcgttctacgacgggctctacgtcggcggcgtcgccgacgcccgcatccgcccggcgctccgcacgttgaagcagaacatgtcgctgctcctctccgtgctcatcgaccgcgtgcagccggtggcggtgcaggaggcgagcgaagcagccaggcggagtggggggcgccgtcgccgatcagcagccgctcgtcgccggagtaggcgacggcaaa

SEQ ID NO: 42079 - DNA, 341 bp, Oryza sativa
  unsure (1)..(341): unsure at all n locations
  Clone ID: uC-osroM202008e11b1
tcgtacctttttactctgcttctgacgcttattaatggacatatcaatcctgtacctggatgggagcatatgttagctggatatgatattcgtaacgcatcttctatcctagatggtgttaaattcctatctttgaacccacttatacctttggacaaaaatattatccacccaactctacaatagcctatgatgtccctgatcaaatgatggcttatgctatttatgaaacagatgtccttactactacagacatctaccaagacatttctgccatgttaactgangaaaccgaaagtgtctcttttggtattggatttagccttggtgcttggggtatt

SEQ ID NO: 42080 - DNA, 340 bp, Oryza sativa
  Clone ID: uC-osroM202008e12b1
ttggtatcagagcaatttcgatcgagaagaaccaaagctacttctaagccaaagatggtgcacgcaccggcgaaagtggcagctgcggcggcgatcccgctgctgacgccgtacaagatggggcctggagctctcccaccgtgtggtgctcgcgccgctcacgcggtgccgctcctacggcaacgtgccgaagccgcacgcggcggtgtactactcgcagcgggcgaccaggggcggcctcctcatcgcggaggccaccgacatctcccccaccgcgcagggctacccggagacccccggcatttacacgcagcagcagatcgaggcgtggaagcccatc

SEQ ID NO: 42081 - DNA, 332 bp, Oryza sativa
  Clone ID: uC-osroM202008f06b1
ctccttcgcgcgagcgagaagcagactagccgcggtggagatgtggagctcggattccgaggcagacctcgccgccgccgccgccatgaccaccaccaccaccacaacctcctcctctcatcctcctccccttcctcctcccctcccccgcctcgccctcgccatcgccaccaccgccgcgccgcccgcaggacccacccggtggaggccgaggcggccgaggaggtgtggcgcggcgcgcagtgggaggcggcgtggccgcggcggacgaagccggtggtggtcgccgaggacgagccgccgagcggcggcgtcatcgtcggcgcgtgcac

SEQ ID NO: 42082 - DNA, 348 bp, Oryza sativa
  Clone ID: uC-osroM202008f08b1
tttttaccgtgattggatcgatcaccggagcgacgatcaatggcgacgctcaccgtgcccgccgccgtgccgcccgtcgccgaggactgcgagcagctgcgcaaggcgttcaaagggtggggcacgacgagaagctcatcatctccatcctcgcccaccgcgacgcggcgcagcgccgggcgatccgccgcgcctacgccgaggcgtacggcgaggagctgctccgcgccctcaacgacgagatccacggcaaattcgagagggcggtgatccagtggacgctggacccggcggagcgggacgcggtgctggcgaacgaggaggcgaggaagtggcacccggggggcc

SEQ ID NO: 42083 - DNA, 81 bp, Oryza sativa
  Clone ID: uC-osroM202008f09b1
tttctgcatatctagtctagaccaacctgaaggggaccaatttataggccaggcgcggcgaggatccgagaggcgaggaga

SEQ ID NO: 42084 - DNA, 341 bp, Oryza sativa
  Clone ID: uC-osroM202008f11b1
ttgtgttataaacaaggacaacgcagatgaggtgagagcttagtacatcattgaggctgcaaaccaccccacagaccctgaggcagatgagatcctgtccaggaaaggcgttctcatccttccacatcctcgcaaactccggtggggtgacacagagctacttctagtgggaacagaacattcagggtttcatgtgggacgaggagaaggtgaacaatcagctgaagacctacatgacccgaggactcagggaagcgaaggagatgtgcacgagccaccactgcgacctccgaatgggcgccttcaccctcggtgtcaaccgtgtcgcttcgcgccaccgt

SEQ ID NO: 42085 - DNA, 340 bp, Oryza sativa
  Clone ID: uC-osroM202008f12b1
ttgtttgagggaaaaaaaaagagaaaaagaaaagaaaaaaatgaagaagaagagagaactcgaactctcgcctaccatttcgcccccctccgcaagcaatccaccactgcatcggcggcgaggctcaccggcggcgagccatgtgcggcggcgccatcatccaccacctgaaggggcacccggaggggtcgcgccgggcgacggaggggctcctgtggcccgagaagaagaagcccaggtggggcggcggcgggaggcgccacttcggggggttcgtggaggaggacgacgaggacttcgaggccgacttcgaggagttcgaggtggactccggggactc

SEQ ID NO: 42086 - DNA, 353 bp, Oryza sativa
  Clone ID: uC-osroM202008g01b1
catttttctacctgactagtactaccactactagctagtagcgatgctactctctctggccatcaagctttgagtggttggagtggtggcagctatggctttttccatctccaagaaggctgcagttgctactcttctccttccttgttgtcacctgcgtcgccggcgccaggccggggaacttcagcgcctccgacttcaccgccgatcccaactgggaagtcgccagggccacctggtacggcgctcccaccggcgccggccctgacgacgatggcggtgcttgcgggttcaagaacaccaaccagtacccgttctcgtcgatgacctcctgcggcaacgagcctatcttc

SEQ ID NO: 42087 - DNA, 341 bp, Oryza sativa
  Clone ID: uC-osroM202008g02b1
atgtatacactacttacacgacttacagccactgtttcgaggagtcctgagtctttggctttgacccttttgtagtcctcgctcaagccaagctctgaacggctgccgaacacgcacgttgccactgtggcctagtgaaaacaatgatggcagcagcactgcgcacctctgctcctgctgggccctggatcaacagagggcccaaaagagcgtcaccccgggtcccgctgcacccctgcagtgccaggcgccctgcgggcaggctgcccaccatcagcactgctgccagcaaaggggattcaggtgacctgcctggcctcctgaatggcagcaagcccttt

SEQ ID NO: 42088 - DNA, 350 bp, Oryza sativa
  Clone ID: uC-osroM202008g03b1
cttttgtgtgggcggagatatcactactactactcctctttcccactcctctggctggcttcctactcctcccctgcttcgccgccgcgtgctcctccggcgccggcggagaagctccaagcctactacctccgggccgccgggaatggcggggaagcaaggagatgggcgcgaggaggatggcgctaaggtcggcctcccggcgctggatatatcgctcgcgttgccgcaggccacgccggcatacatcttcccgccatcagcatcggactattatcagattgatgatttactcaccactgaagagcagtctatcaggaagaatgtcagggctataatggagaaagaaa

SEQ ID NO: 42089 - DNA, 343 bp, Oryza sativa
  Clone ID: uC-osroM202008g04b1
ttctatcagaactagttgagaattgcaaaatcttggaaagcctctacaaagaaatgatggatattgagttcactgttcaagaaaatagactgtggatgctgcaatgcagaacagggaagcgcacgcaaaggtgctgtgaagattgctgtagacatggtcaatgagggactgattgaccggcgttcagcaattaagatggtggaaccacggcacttggaccagcttcttcatccccagttttgagagcccgttgtcatatggagacaaagttattgctacaggcttgcctgtatcaccaggagctgctgtaggccagattgttttcacagctgacgatgctgaa

SEQ ID NO: 42090 - DNA, 345 bp, Oryza sativa
  Clone ID: uC-osroM202008g05b1
gtcttcgccacccgcagtggcaggaggtcgccgaggtcgtctcctcccgcgacggctactccaagcagcccaagtccgacgtccagtgcaagaaccgcatcgacacgctcaagaagaagtacaagtcgagaaggccaagccggactcctcctggccctacttccaccgcctcgacaccctcctcgcccccgtgcacaagcccgcgggcgcctaccccgccgccgccgccgccggggccgcgggcgcgggcaattccggctccaactccgccgccgccgctaccgccgcccggagcaccgcgcccatggcgccgcgcgtcaacttcccgcagcgcacgcgcacgca

SEQ ID NO: 42091 - DNA, 336 bp, Oryza sativa
  Clone ID: uC-osroM202008g06b1
ctaaatccctcggagagagagagagatagagaggttgaaaaaatcaaacccttttgaggaagaaatcatggcgtggcagtatcccatggacggaccccacgcgagcgggagcaaggcgcggcggcggtggctgatggcccgggaacccagaggacgcactatccttatgcgactggctcatcaatcattgcactgaaacacaaggatggtgtcatcatggcatccgacactggagcctcatatggcttaactttgcgatccaagagcgtggagcgcattaaggattgtggtaagcatacccttattggagcaagtggggagttcagtgattcccag

SEQ ID NO: 42092 - DNA, 346 bp, Oryza sativa
  Clone ID: uC-osroM202008g08b1
ttttgatccagccattccagcttgcccgtgcccagccaccaggcgtgcggcgcgccgctgcctcctccgtcgacgcgcgcgcggccgccgcctcctcctccgtcgacgcgcgcggccgagagaggcggcccgggcagcgacggtgctgggcggcggggcggacggaggtggcgccagcgctgggcggcgggtcgagcggaggcggcgaaatccgtggctggagaaagggagggcccgggtggcgacggcgctgggcggcggggcggatggaggcggcgccggcgggcagcccgagcggcaaccccaccaccaccctcatctccgtcactctcccacgacgggtacc

SEQ ID NO: 42093 - DNA, 342 bp, Oryza sativa
  Clone ID: uC-osroM202008g10b1
tttagattgctcgatcccctcgtgtccctctctcccaacaacactgcgccacagacacaaatcacactcagatacgaaagataagtacagagagagagagagggcacggattatacactgcacaagcatatatatatatatatcgattagccatccgtgctgatctgaagagtatcatcggtagagagttttacagagttgtttggacaaggagacacacacatggctttcttgctcttctttgtctttgtgacagctgcagtgctgtgcttcgtcgtcccggcgttcttgctgctctgcacgagcgtgcagaggaggagagatgttggacagggtggaggg

SEQ ID NO: 42094 - DNA, 342 bp, Oryza sativa
  Clone ID: uC-osroM202008g11b1
ttgttgttgtaaagttgcgagagagagagagagagagatcagttagtttgttgagtggaagcagatcaggaagatgctggagaagctgtgggacgacgtggtggccggtcctcgaccggagccggcctcgagaagctccgcaaggccgctacaacccgcccccttgtcatcaacaaagatggcgacggcgaggcgagcggagtggcgtacaagcggacgcagtcgatgccgacgaccccgacgacgccggtgacgccgtcgtcttcgtccccgacgacggcgacgacgacgacgccgcggggcagcaacgtgtggaggagcgtgttccacccggggagcaac

SEQ ID NO: 42095 - DNA, 341 bp, Oryza sativa
  Clone ID: uC-osroM202008g12b1
gtgatgaaggagagctctgctcctccgccggctgctgttgtggcggcggcggcccagggatgacgagagggaggggcggacaggtggcacgctggtgcaaaagaggagcccggacggcgacccccggccgggcccgtgcacaccatacgcgtcaaggtcaagttcaacggtgtctaccacgagatctacatcaactcgcaggcgtccttcggtgagctgaaaaaacatctgccggcgccgacagggctgcacccggaggaccataagaacgttcacaaggacaaggagagggactccaaggcgttccttgacatggccggggtcaaggaccgatccaagat

SEQ ID NO: 42096 - DNA, 344 bp, Oryza sativa
  Clone ID: uC-osroM202008h04b1
gatcctgacggcgcggtctccggcggacgattcggcggcacgcaacgcaaccctccctctgtccctccggcgtcggtcaaacttacgtccggccaggacacgcccgagcagcggttcacgcacactatcctgctgaccaacccacccggaccggcggtgacgcgtgggcccccgagcccacctgtcatgagaggccggtggggccaacgatatactagtgtaaaatatattcagctcgtcggtgtcgtcgcttaccagacggctcgcctttctgtgtcccggtcgtgggtctccgctgcctctgttgcttctctcttgccctcctgtactactactaccagcag

SEQ ID NO: 42097 - DNA, 346 bp, Oryza sativa
  Clone ID: uC-osroM202008h06b1
ctttcaccaagcaagcgtgcacaacaattgcactacgagatcatggcctcggatcgtagggtttgcaccgtccaccacatgagccacgcggcaatcgtgctggtttcagtactgctgctgtgctccacatccctccgcgggagccaggaggctcatggagctgtacaagccaccgcccagcgagcaactcacgtaccacaacggcaccgtgttgcggggcgacatccccgtgtcggtcgtctggtacggccgcttcacgccggcgcagaaggccgtcgtctccgacttcctcctcttgctcaccgtcgcctcgccggcgccgaccccgtccgtgtcgcagtggtgg

SEQ ID NO: 42098 - DNA, 230 bp, Oryza sativa
  Clone ID: uC-osroM202008h07b1
ttgttccatcccctcccccgccggaaaggggggctattaaactcgcggccctctagcccgcactcagggagaacctgggcggggctcagcgcggttcgattcgatctcctggcggagatctgcccgcactcgcggaagaaaagaatacgacccatagagacctctgcggtcacgggcccacaagggaagagataggagttgacgccaaggaacccccgacggataccacg

SEQ ID NO: 42099 - DNA, 350 bp, Oryza sativa
  Clone ID: uC-osroM202008h08b1
tttttcgatcccctcccctgcacggttcaaaacggggatcgttagagttctgcatcagtgatgggctggagatttgcgttgttactgttacatgttcttctgtgccttgtcaatggcgtctcctgtgcgcacgagctcttacgtgcgtacggagtacccatcgactgatatacctctagaaagcgaatggtttgcggttccaaacggctacaatgcgccacagcaggttcatatcactcaaggtgactataatggaaaagctgttatagtatcatgggttactgtagcagaacctgggacaagtgaggtgctctatggtaaaaatgagcaccagtatgatcagagagtgg

SEQ ID NO: 42100 - DNA, 335 bp, Oryza sativa
  Clone ID: uC-osroM202008h10b1
ataccgtgaattgccttagtctccaaggagaacttggagacaataaacctgcatgatatagaataaacccaatcatctctgagtaggactcggttaatcaccagtccatgaggagttttccataatatcttctagttttccttatcatatatgggaatatatcgtatatacgaaggtataccatatccgtatatttcgtaattcataggaaaggaggtatgccttattcataaccatgacaatttccattggcatattttatttatgttgtagcaggcacccggaacaaagggttggcctcctatttaaccaagacatggcctcgaacgcctaac

SEQ ID NO: 42101 - DNA, 343 bp, Oryza sativa
  Clone ID: uC-osroM202008h11b1
ctcaccgcgactccgcgagcgagagaggaggcggacccctctgcacctccccgcaaaaccctaacccctcctcctcccacctcccgccacgccaccatggcctggcccccgccgtcgccgccccgccgccgcccccggatcgccgacgtcggcgcaagtggtggggaacgcgttcgagcaccagtactacaacatcctgcaccagtcgccggatcccttccaccgcttctaccaggacgggagccgcatcggacgccccgcctcccccgccgccgccgagatggacaccgtcaccaccatggaggcgattaacgcgaagatcgtgtccatggacatcgcgcgg

SEQ ID NO: 42102 - DNA, 115 bp, Oryza sativa
  Clone ID: uC-osroM202010a03b1
ggttaacatcatcatctaccatcctatgtgaatatgtttccattgatataggggggggccacagaagcacgccaaagccccaaaaaaaaaaaaatgtaaagctttttccacccac

SEQ ID NO: 42103 - DNA, 126 bp, Oryza sativa
  Clone ID: uC-osroM202010a06b1
ctctatccgcataccctgctccttcaccccctgtgggccactttaataaccgggggcggttctaaaactccctgcctccgaatgcatggaccacagtaccaaccttcatgcggcgatagaatcgct

SEQ ID NO: 42104 - DNA, 468 bp, Oryza sativa
  Clone ID: uC-osroM202010a12b1
tttcacgccgcctttgccttagatctcctgggggccgcctccaccgccggcgcgtgcccacggtccctccctcgccatggagggtaacagtaccaacctcgatgcggcgatagagtcgctcctcaacgtggagaagcagatgaggctggccggcgatgtcgccggcacgaggaaggccgccatcgacatcgtcgagctctgctacaaggccggcgcctggaagacgctcaacgatcagatcgtggtcctctccaagaggaggggccagcttaagcaggctatcactgccatggttcagaaagcaatggagtacattgacttaacgccagacatggacacacgtattgagctaatcaagacgttgagcagtgtatctgctggaaaaatatatgtggagatagagagagcaagattgatcaaaagacttgcaaaaatcaaagaggagcagggacagattgatgaggctgc

SEQ ID NO: 42105 - DNA, 85 bp, Oryza sativa
  Clone ID: uC-osroM202010b03b1
ttctcatatcacatactctccttcctcttcctgtggtcacttatttatcccccgcgcgcgccaccgtcgtcgccatgtcgggcaa

SEQ ID NO: 42106 - DNA, 491 bp, Oryza sativa
  Clone ID: uC-osroM202010b06b1
ttctgttcctcctttggttttcggtcgttgaaggacatcactacgaaagggggatgattgcaacttcattgggaacaaagtacttcttgcgaaatgtagtcacgcaaggctccagaattgctggaagggccctcagcactgagtcgtcaatctttacttctcatttgtgcaaccaaaagcgggacaatgaatcgcctcagcgagagttcaaggctttcaagagtaccgcggctgccactcctgcccaaggaaagggagaatctcgtgacacgtacaaagtagcccagcatttggtcggaacggacgcttgtgccaaggttggcttgaactctcttggcatcaccggacctaccacgatttaccgcaacatgacattccaagagctttttgaacacgaacaagccaacaacgaaagaaaggttgctgctgctgccaatggtgacactttcactgtctacacgggaaaatacactggtcgttctcccaaggat

SEQ ID NO: 42107 - DNA, 119 bp, Oryza sativa
  Clone ID: uC-osroM202010b08b1
aaaccagagacttcactggattttattccctctcgcgccaaagttacgacataacgtctcgttaagacacgaataaacgtcacgaattccaacgttgatcgaattttacatgcaccaac

SEQ ID NO: 42108 - DNA, 138 bp, Oryza sativa
  Clone ID: uC-osroM202010b09b1
gttttcagtttttatggcccgcactcgtcagggagccttttatgcgctcctgggccatcagattgagctatgctgaaccttgcaatgacaactggcataattgaggattccaaagcagccgtggagtattattaccaa

SEQ ID NO: 42109 - DNA, 531 bp, Oryza sativa
  Clone ID: uC-osroM202010b10b1
gttgattcaagtaggaggcgcaccctttctctagatcttctggcaaggcttgcccagtgtgcatataattctgcaaagtctaagaacagatttcacttttggggaagccattggaggcatggagatgcattacttttttcacttgcgtctgcccaggttatgtattctttcgttatgaggcctgaaagcttacctaaatcgtaccaagacttcatccaaaagactggaccagttgcggaacctgtttacaaggctgtaagagattgctgcagaggtggtcatgtggatctcattggtctctcagcctatttagctaacaagaagaattcaaatttgataaatttaacaaaaagtccacccattattccatgttctgtgatacatcctgacagagcatcgtgcttggctcataatgtcagtgtctcttcatcaacgttcaagaaaacattccctctgtatttctcattgacatttgtcccatttgttgttctacgcctttaaaagttcttggaatcaccagctgcaacttgt

SEQ ID NO: 42110 - DNA, 554 bp, Oryza sativa
  unsure (1)..(554): unsure at all n locations
  Clone ID: uC-osroM202010b11b1
tttttgcatgccatttttttcaggtaaccaggtggaatgaataatgggagaattatgtttactgataatgtgcatttttatttactgtgccttattagttcatttggcatggacgcccttacttttgcatcagctcaggcttagcaagaaagattctcatcctgttttaattgctgacccatgaatgattaatcttgaccccccaccctcaagcaactctgttgcttttcgcttgcgagaacgcagttctgtaatctagcttaactcagaccgattccttattttattgataatctcatctatttgtcatgtgagtaatttaagtggcgcttaaacaacaatgaaacaattgtccagatgtggttggaacaaaaccatatccacttgccgtcaaaaaaaaagaaaagaaaaataagtgcaaatttgntatttcttgttcctcgcatggttaaagatggtcttcctcgtatggttgaagatggtcttgcttctcactatgaattattcttgtgcttgcagatggatgatactctgacaactggaagcatcaggag

SEQ ID NO: 42111 - DNA, 121 bp, Oryza sativa
  Clone ID: uC-osroM202010c03b1
atcgcgagcggcgcccttatattttttttttaaaaaagaaacttccttgtgttttcttttaatgggactggggttgctgaacaaggggaccatgaacaccaacgctgacacatctccacat

SEQ ID NO: 42112 - DNA, 364 bp, Oryza sativa
  Clone ID: uC-osroM202010c05b1
gtttttgcctttcttggagcttgccaggcatggggggtgcttttagtagcgaggtgtggtggtgccaacaagcggaagggcgaggggctcggggagatgcacgacgacgtgctcgagcgcgttctggcgaggctcccgccggcgagctacttccggctcaggggggtgtgccggctgtggagcgacgccgcgtcgtcgcccacgttcctcgccgcgtgcggacgcgtccccgcgcgcgacccgtggatgctcatgctgacggagggggaggggcaggagcggcgtcttccggccgtacgcgttcgacgccagccagggggaatgggcgcggtgcgggggcgcgcccgagcacgagatgccggcg

SEQ ID NO: 42113 - DNA, 346 bp, Oryza sativa
  Clone ID: uC-osroM202010c06b1
ggttgggcgtccccgcgaagccgatgcagccgggggggtccatacgatccggcatgggcaagaaggccaacaaggccagcgcctgatcattgccggcgtctcgccgcccgtcgccgccgcgcgctgtatccctgtatagcctaggtgttgctgcttacctagtagtagttcgccatggtcatctcgtctgcttcgatcgatcgagcgctctgtgtacggtgtgtgtgttgcgttgtagataaggttcgggtttctttttgcaagggaggaagaagctactgtagcatatcgccaagaagcttgtatgataagacgatctggcgctcgcagctttgtcttatgttca

SEQ ID NO: 42114 - DNA, 436 bp, Oryza sativa
  Clone ID: uC-osroM202010c10b1
ttttcatttcttatgggtagaaattgccacgggggcttttttgcactctagaggggtcacatagagctatttgaattttgctatgttaatttgaataatacagtattccaaagcggcagtggatcattataaccaactaccacaaactattcaattgcagaatttctgcattccaatttttgcatttctcaatttaatcatgtattttggtttgagtaattgcaaagtaaaactgattctgtaattgtaaaaatgaatgaattttctggacaacatttaatgtgattttatcaaaacacaatgaaccttttaatttgtccgtatagttctgttttcttttattttcaaaagtaagatcctcagtataagcttttgtttgtggatcttttaaaaatgaatattgggggggcaatcctctcttgcttcaccgttggac

SEQ ID NO: 42115 - DNA, 544 bp, Oryza sativa
  Clone ID: uC-osroM202010d05b1
catgacttgtctctaaggcctgagctcagtctgggagacctcaggtcgtcttcttgctccaatctctcgtacgaaagaagaaagtttttaggaagctaggagcagcacacagtccttctccctctcttcttgctatttagtgcagacctcaaatccaaagtgcctttattttccatcaagaaagcaaacacagtgtattcaagagtgcttctgttcctgaaaattaaacaaattgataataattttcaaggaagtatgaaactaatagcttttgggctgttattactggggtatatacaatattttgctacacctgattccgaagtcatagcattgtatgaaataaggacaatgctcaatgacagtcgcggcgtactgaatggctggaataataatcaagttagtccctgctattttccttccatcagttgtaatcaagatcaaaaggtcatttcaataactttgagctcatcaggattatctggattcttgcacccagcattggaaagctactatatttacaacagctattattgaatgataa

SEQ ID NO: 42116 - DNA, 513 bp, Oryza sativa
  Clone ID: uC-osroM202010d06b1
cgccgcttcgccgacctgtttggcctcgaagccaagaccgatggcgacgaggactggctcgggatttgggacggccaccgcttcgtcttccagacgctccgcccgctaccgcccgggacgtcctggctccgccgcaagctgcacacccttgttaactcgctgcgcctctttaagcgctatggtctctcgctgctcaagatggacagatttgtccaggaaatgttgcaaagatttatgctctactacaatggctttgaatcccgacctgtttttgacacggttgaggagatgctcaaatggtcgggcctctatggcctcactcgcaggacactagaggcagagctgcttgatgctggcctcaattctcaaactatttcagagcttgtcactgtgataacaagaatcaactatgggcaaagtgtgagtataagtggccttgctggtgcggtttctttagctggttctgaatcaggactgtgggctgtcaaagggggcaacctgcagctagctgct

SEQ ID NO: 42117 - DNA, 380 bp, Oryza sativa
  Clone ID: uC-osroM202010d08b1
tttgagctcttcttctacttaaaagaaaaagagcacgcatatctagtagtactgttctagtgttcttgtacttctattcgtgtgctactactgcatctgtgagtctgtgtgactgtacacatctgtaatggagtgcgaaaccgggcttgttcgttccctgaacggcgacgggctgtgcatgtcgtcggtgtcggcgccgccgcgggccgacccactgaactgggggaaggcggcggacgagcttgcggggagccacctctaccaggtgaagcggatggtggaggacttccgccagccgctggtgaagatcgagggcgccagcctgacaatcgcgcaagtggccgccgtggtcgtcggcgccggcgacgccagggtggagc

SEQ ID NO: 42118 - DNA, 180 bp, Oryza sativa
  Clone ID: uC-osroM202010d09b1
ttttatatgcaggagagcgatatcaaatggggggtgcttttggacagctacggggggattaccgatgatcagatccactggttctccatcgtgaactcgctgatgatcgtgctgttcttgtccgggatgctggccatgatcatgctgaggacgctgtaccgggacatttccaagtacaac

SEQ ID NO: 42119 - DNA, 426 bp, Oryza sativa
  Clone ID: uC-osroM202010d10b1
ttgtcgcgtggggcaagtcgcaagccccagggggtcaccttggacggcagcggggggcacacaagaacgggaacccgaacggcaaccccacgccggccgccgcgtcgcgctgttcccgctgccgttccagggccacctgagccccatgctccagctcgccgatctcctccgcgcgcgggggctcgccgtcaccgtcctccacacgcgctccaacgcgcccgacccggcgcgccaccgccacgggccggacctcgccttcctccccatccacgaggcggggctccccgaggaggccacctcccctggcgccgacatcgtcgcgcagctcctcgcgctcaacgccgcctgcgaggccccgttccgggacgccctggcgtcgctgctcccctgcgtggcgtgcgccgtggtggacgggcagtggtactc

SEQ ID NO: 42120 - DNA, 236 bp, Oryza sativa
  Clone ID: uC-osroM202010e02b1
ttctccttactcccccccgcttccactccccgggaccttttagaaccttctggggcgtcccccgccgagatggatgactcggagaacaacgcgccgtcgacgccggggtcgccggggttcagcacagacaggctgtcggcgaacaccaccaccagccgtggcgccaccgaaccgtgcttctacttggacgacgaccaccaccaccttgttggtgctgaggaggcggaggttgaacc

SEQ ID NO: 42121 - DNA, 424 bp, Oryza sativa
  Clone ID: uC-osroM202010e05b1
gtcttcgccgccgcagaatcggaagcaatccggggggagtctcgaccatttcttgcgagtagtactagaggggagagtgagtgaggggcgtgctgcaatggcgactgaggaggttgtccctgaggttccggtgaccgaggtggaggctgccgcggcggaggaggccgtccaggagacgacggcggcggaggagaaggccgccaagccggcgaaggagaagaagaaggccggcaggccgccgaaggagaagaaggaggccaagccggcgaaggagaagaaggtgaaggaggccaaggccaagaagccccgcgtcgccgccgcccacccgccgtacgccgagatgatcatggaggcgatcgtggcgctgaaagagaggactggatcgagctcccaggccatcggcaagcacattcatgccaaccat

SEQ ID NO: 42122 - DNA, 267 bp, Oryza sativa
  Clone ID: uC-osroM202010e06b1
ctacgtgtgttgcctccaacccaagaccgctagccccgggggctgtttgaaaatttgggggggtcaccacaacagctgccagacagtcagggcgctaccgcccgggacgatctggctgctccccatgctgaacaccctagctaactcgctgctcctctttaagcgctatggcctctggctactcacgatggacagatttgtccacgaaatgccgcaaaaatacatgatgtactacaatggctctgaaaacgagactgatgattgaca

SEQ ID NO: 42123 - DNA, 102 bp, Oryza sativa
  Clone ID: uC-osroM202010e07b1
tgtgataacaccacaacgcattctagccaaggggggggttttaaccatcgagagggtccttaacaccacccactcctgcctgggcatcagtctccaccaccg

SEQ ID NO: 42124 - DNA, 126 bp, Oryza sativa
  Clone ID: uC-osroM202010e08b1
ctggccccgccgcgccgcttttacgccacgaagcagctccacaagtcgggggggacctttttaaccggagggggggcacacccccgcctccaaggcgtccaaaggagttcctccccgggcccccga

SEQ ID NO: 42125 - DNA, 345 bp, Oryza sativa
  Clone ID: uC-osroM202010e09b1
tttgaaacaagtcagaggaacgcagctccgtgttctgtttaaatccagaggggggcacgcacacgctgcactgactgaggccgacgcggcggcggcggcggcagcggcggcggcgaaagcgaccccgatgacgaagcccaagaacggctgcctcaagatcctcgcctgcgccggcggcggatccgacccgtccgccggctccgacggcgacgcggatgaccacgtcgacgagaacaaggccatatcagataaaagtaggtggagctttcgtaggaggtctacaaggcatcgtgttttgaagaattctgatatatctgaacctgaaactcttaggttgagccaagc

SEQ ID NO: 42126 - DNA, 454 bp, Oryza sativa
  Clone ID: uC-osroM202010e11b1
ctttcttgcataagaactcccccccctcctcggggcccttcgacgccgccggggggttggacaggagaaatccccaggctcagaggatttttggtagtcttgtttcgtgatattcgcgaagagggggggagctaaggggggattcgtaagatcagaattggatcacgcgggggcgcgctcgggatcgggggttccaaacacagcttcttcgttgaatttaagtggatgtactaatggagtcaaagggtggcaaaaagaagtctagcagtagtcgttccttgatgtatgaagctccccttggctacagcattgaggacgttcgacctgcccgaggcgtgaagaagttccagtctgctgcttactccaactgcgcgaagaagccatcctgatagccctttcgggttctccatcctagaagtttaggatttcttgcaattccattttggcacttttc

SEQ ID NO: 42127 - DNA, 255 bp, Oryza sativa
  Clone ID: uC-osroM202010f02b1
tgagacccactactccgttccatcaagaacacacacacatccagaaagcctaatccaatccaaaagccctaatcacccagactccatctctgtgaggtttgagagaggtaggtgagccgtaaatctgagcgagttcttgggtcttccaacaggtagaacacttcatctgaggatcaaactttttttttttcctttgtttttgagcttctgctggtgtacaggacagagaagatccagaggccttttagatttctg

SEQ ID NO: 42128 - DNA, 184 bp, Oryza sativa
  unsure (1)..(184): unsure at all n locations
  Clone ID: uC-osroM202010f03b1
cgaaaccccaatccccattatcgacgcttcctccgccccggcgatcgcgggcacccttatccccccgcgaccgcctccgattgattcgatccggtgatcttgtgttgttgccacatgattgttgcctctaaatgattctatgggggcccccaatgaagtgacatngtactttttccttttcaaa

SEQ ID NO: 42129 - DNA, 113 bp, Oryza sativa
  Clone ID: uC-osroM202010f07b1
gtaggcgaagaggctagctagctagctagggtgtcgtgctccccatcgcctggcgcgcgcagccggatccgatcgggcgtactcgtcggcgacggcggcggtgcccctgatat

SEQ ID NO: 42130 - DNA, 511 bp, Oryza sativa
  Clone ID: uC-osroM202010f10b1
gttagtagtggtagatccagagcggcctgctggggaagttgggatgcctgccatggccaagcccgcctcccgcgctgccaagcccgcgtcggcgccgaagaagcagaaggcaaagccctccgccgccgccggtggctcctcccacccgccttatttcgagatgatcaaggaggcgatcacggtgcttaaggagaggaccggctcgagcgcgcacgccatcgccaagtacatggaggagaagcacggggcgtcgctgccggccaactacaagaagatgctctccatccagctgcgcgggttcgcttccaagggcaagctcgtcaaggttaaggcctcctacaagctcttcgacgccgccaaggactcgcccaaggccaagcctgccgcccccgcccccaaggcagcagcgccgaagccagcgaaggacgccgccaaacccaagaaggacgccgccgctgccaaacccaagaaggcccccgccgctggcaccaagccgcaggcgccggaaaag

SEQ ID NO: 42131 - DNA, 499 bp, Oryza sativa
  Clone ID: uC-osroM202010f11b1
gttccgggttggcctcgcctgccgcgggccctggccggataggggcatctccctggactccgcgcgatccgtcctcgatcacattcagggggaggacttgctggtcacctgctactacatcgactgcggcatgaacgcctacgccatatcacctgcgcagctatattccaacaccccttcagattttgatttcaaacttgaaagtctagcccaaggattccaatccctatttgactttgcacaacatcttgccgcaaatgttgacattgtcttcccggtgatccatggcaaatttggtgaagatggcggtattcaggagctcttggagaaagccaacgttccattcgttgggacaccctctaaaaattgcctccttgcttttgacaagtataatgcatcgcttgagctcaatgcacacggctttttaacagtaccaaactttcttgtagagaaggacacattagctaagtcgaaactggaggaatggcttcaaagcatc

SEQ ID NO: 42132 - DNA, 202 bp, Oryza sativa
  Clone ID: uC-osroM202010g02b1
ctcatatcctcttcttcttcttcttccctcttcttgtggtggtgggtttgacccaagaacggaggagggatagggcgggcggcgatgggggcagttcgggggattttggtcgtggcggtggttcttgcggtggcggcgattcttgcttgggcggcggatgggatggtgtacggcaaggcgaaggggaagtacagggcgctgt

SEQ ID NO: 42133 - DNA, 200 bp, Oryza sativa
  Clone ID: uC-osroM202010g03b1
gtctattgcgccccttatgcattagagcccccggagtcccctctgtttcgcagataagtcctttggttcccatctttttattacattcaggtcctcctagtttcttttcctttcgagtctactccttgcatttcttgcgaggaagcccctcgggttggtcgaattttagatttcactccctctccctccggagtcactgc

SEQ ID NO: 42134 - DNA, 285 bp, Oryza sativa
  Clone ID: uC-osroM202010g07b1
cttgcttgccgctacactttatctactctctcacacactcctctgatctctctctctctctctcgctagtcgattggcttgcctagctctctcaaactgctctagtgcagttcagcaaaaactaagtgactgaaactaatttacatggcaacggtgacccgtgcacacctggagcagaagctcgccctcgccaagcgctgctcgcgtgaggcaaacattgcaagggttaaggcgggtgccgttgcgaccactcgttttgcagttcccacccttgcgagcgtgagg

SEQ ID NO: 42135 - DNA, 416 bp, Oryza sativa
  Clone ID: uC-osroM202010g10b1
ttatgcttcaagggattgtaacatctcgcgtatggcaaagcctgtatcttgtcttcgaatacatggaacatgacctttctggtctcattgcaactcctggcctcaagctctctgagccacagataaagtgcttcgttcagcagctgcttcatggccttgatcattgccacaaaaatggagttcttcatagagacatcaaaggctcaaaccttttgattgataacaatggagtgctgaaaattgccgactttggactggcaatatcttatgatcccaagaatccacaaccgctgacaagccgtgtagtgacattgtggtacagaccaccagaactttttgttggtgcaacaaaatatggtgtggcctgtgatatgtggagcacagggtgcattgtggcagaactcttttctggaaaa

SEQ ID NO: 42136 - DNA, 414 bp, Oryza sativa
  unsure (1)..(414): unsure at all n locations
  Clone ID: uC-osroM202010g11b1
ttatggcgtcttcgtactcgcctctctccgcgcgggcgcgcttttcctcctcctgtgccctctctcccttctccgccgccgtcgcagcatcaacccaatccgccgccatgagggagtgcatctcgatccacatcggccaggccggtatccaggtcgggaacgcgtgctgggagctctactgcctcgagcatggcatccaggctgatggtcagatgcccagcgacaggactgccggtggaggtgatgatgctttcaacaccttcttcagtgagactggtgctgggaagcatgttccccgtgctgtatttgttgatcttgagcctactgtgattgatgaggtgaggactggntgctaccgccagctctttcaccctgagcagctcatcaatggcaaggaggatgcagctaacaact

SEQ ID NO: 42137 - DNA, 254 bp, Oryza sativa
  Clone ID: uC-osroM202010h02b1
gcacttcaatgcatattttccatgaataatataggtgtatattgtacaaaaggtgggggactctgaacttgggaggattttaggtgatcactggatacggaggcgccgtgggaagattcggtaaaattcaaagaactaccttaggatatcatggactaaggttttgtcttttctcaaggatgatgcacaccggggcagaagctgaaattgaagtggttgtgggaatagctcttggatcaatgagaaattcaaga

SEQ ID NO: 42138 - DNA, 256 bp, Oryza sativa
  Clone ID: uC-osroM202010h03b1
gcatttgcaagagtagtagtagtggtgctctggggggctacttctgcttgatcgagggatcgatcgccatggcttcttctctttcagtggccgtgctcctgtgcctcgccgccgccgcggcggcgcagctgtcgccgacgttctacgacacgtcgtgccccagggcgctggccaccatcaagagcgccctgacggccgccgcgaacaacgagcctcgcatgggggcgtcactgctcaggctgcacttccatgactg

SEQ ID NO: 42139 - DNA, 356 bp, Oryza sativa
  Clone ID: uC-osroM202010h07b1
tttccccaaactcgagcctccatctccctccgggatccagacaccgatcgaggcgttgacgacgactagctcatggggacgaggaggaggagtgcgcgagcgcgagcgcggccgccgctggccatgccgctcgccgtgcttcttctcttcgcctgttcttccggcgtcgcagccgcggccgctcagggcatcgagcggatcaaagacgatcctgttggaaagctgaaggtgtatgtctacgagctgccccccaagtacaacaagaacattgtggcgaaagattccagatgcctcagccacatgtttgtacagagatctttatgcatcgcttcctgctgtcgagtgcgatccggact

SEQ ID NO: 42140 - DNA, 338 bp, Oryza sativa
  Clone ID: uC-osroM202010h09b1
gtttgtcctgaatccctgaccttcagacaaatgggaaggttccaatgcagaagagacactaaatcttggtttgttttcatcacctccaagaaacagaaaattctcctataaaaccgaagtgatcactctcctcccgagctcgaaggagcaacaatggcggatcagatcgagcacctccaccttcccattcgtgggctcaacctccacattgctcaagtcggcaaaaaatagctcgggacggtgatgttcttgcaccggttccccgagatatggtactcgtggcgccaccagatgctcgccgcggcggccgccgggtaccgcgccgtcgcgccggactg

SEQ ID NO: 42141 - DNA, 112 bp, Oryza sativa
  Clone ID: uC-osroM202010h12b1
atatcgcaacggccgccctctttttgtgtttttttttaacacctattggtgttcagaaatcacccccacaagttcacaaagtactggaatccatttacaagcccaacctttt

SEQ ID NO: 42142 - DNA, 443 bp, Oryza sativa
  Clone ID: uC-osroM202011a01b1
tttacgagctcgctctttcctcttccgccctagcgcctgttgaacggctccagcggatctcggcggcgtgctccggcgaccaaggaggccacggaatactgagaggatcagtggaagtgagggccggaccttcttagggcggagtcgaaatttcgtagcagttgagaatcttcgcaggtactggagggcggccatggaggagctggagttgcctctccccacggagaagctcgccgcggatccgggcagggagggaggaaagcgaggtgtggctgtgctcgtggccaccgggagcttcaatcctcccacctacatgcacctgcgcatgtttgaactggcaaaggatgaattgcagcagcgagggtattctgtcttgggtggttacatgtctccggtgaacgatgcttacaagaagaaggtaatgtgtggcatcaccactgttc

SEQ ID NO: 42143 - DNA, 506 bp, Oryza sativa
  Clone ID: uC-osroM202011a02b1
gttgtgtgtaaccaagtttgagacagaggcggggtcggtttagaaaggaagacggggatgacagcgcgaagcatgttgcggaaccacccggaggcgtcggtgctcgacaccatccggcagcacctgctggaggagccgcgcggcggcggcggtggcgaggcggcggaggcgagcttcgggagcctggtggccgacatgtggagcgactcgctgccgttccgcgacgacgacgccgacgacatggtggtgttcggcgcgatgcgggacgcgttctcgtgcgggtggctgcccgacggcgtgttcgcggaggtgaagccggagcccctgctctcgccggactcgtcgtcgtacgacgggtcctcttgctgcttcggcttcgcggacgtgtcggagccggtgacgccgagcgacgcggcgtctggggcggcagaagcgcggccgcggcggccgctgcgactgcggagcacgggaaggaggatgaggcccccgctgccgtggccaggggg

SEQ ID NO: 42144 - DNA, 479 bp, Oryza sativa
  Clone ID: uC-osroM202011a05b1
tttgaaggacccggagaacgcgcacaggcacaagatcactgaggagatcgcggccacggcggcggtcggcgccggcggctacgccttccacgagcaccacgagaagaagaaggaccacaagagcgccgaggagtccaccggcgagaagaagcaccacctcttcggctgatcgacctcatcacaacgtcgccggcggcggcgacgacctcgccgtacgtcgccggccgccgtgtcgtcgatttgtgtgtgtaataatttgtcttcttctgcatgcgtggtgttgctgtttttcacaagagtctccggcctcgaccagtgagaggctgacaggtggggccgtgagttcagcttgtgttgcttgattttctctgcagccttgccctctgtgtgtacaaataagtggtgtgcatggctctctccgtgtcatgtatcaaatgtattttatctgtactttgtacaagtgaagcaatatttattcg

SEQ ID NO: 42145 - DNA, 394 bp, Oryza sativa
  Clone ID: uC-osroM202011a06b1
cttggtgtatttttaagcacacctcatcgacatcaatggcggggcgatttggagagaccccgagcaccgtgctggccgaggaggcgccagtggaggcgacgccggcggccgccgccgccgaggtggaggcgccgaaggaggagacgccggcggcgccggccgaggctgtggccgaggaggcggcgcccgccgaggccgaggtggcggagaccaaggaggcggagccagctgcggccgagccggcggcggaggaagtgaaggaggccgagcccgagccggccgagccggaggccgagcctgccaaggaggaggtggcgccagagcccgccgccgccgccgaggcggaggccaaggaggccgagccggcggcgcatgtggcctaggaggtgaagga

SEQ ID NO: 42146 - DNA, 451 bp, Oryza sativa
  Clone ID: uC-osroM202011a07b1
ttcacacgccggactctccccttctctctgtgtcgctttttaattcgctcggggtatcccccccgaataaaggcgagaagccgcagcggcggacgaagaagagggcagatagaaatggcggcggagacgttcctcttcacctccgagtccgtgaacgagggtcacccggacaagctgtgcgaccaggtgtcggacgcggtgctcgacgcgtgcctcgcccaggaccccgacagcaaggtggcgtgcgagacgtgcaccaagaccaacatggtgatggtgttcggcgagatcaccaccaaggccaccgtcgactacgagaagatcgtccgcgacacctgccgcggcatcggcttcgtgtccgacgacgtcggcctcgacgccgaccgctgcaaggtgctcgtcaacatcgagcagcaagtcgccgacatcgcgcagggggtgcacggtcact

SEQ ID NO: 42147 - DNA, 525 bp, Oryza sativa
  unsure (1)..(525): unsure at all n locations
  Clone ID: uC-osroM202011a08b1
ttcctcagattttcaaggcgagaagccctcgaggcccgccggggcgcactttagggatgtcggcgagcagcgcgccggtggacgcatcgggggatccgatcccgacctcgtcggtgctgatggcggcgtcgaagcacatcgccgtgcggtgcaggccggagaacgtggccttcctcaactgcaagaagaaggaccccaacccgcagaagtgcctcgagaagggccgccaggtcaagcgctgcgtcttcgacctgttgaaagaacttcaccagaagtgccccaaggagatggacgcctatgccggctgcatgtattactacaccaacgaatttgacttctgtcgtaaggagcagcaagattttgagagtgcatgccccgtatctgagtagcctctcagggttttacttcaaatgaatgatcttcacaaataaggagaaaaagccgacaaaccaagttcatgatctcccatnngttgtggtgtnctcacagaatttttctttttcgatgactagcacgcctctgagc

SEQ ID NO: 42148 - DNA, 451 bp, Oryza sativa
  Clone ID: uC-osroM202011a12b1
ttcacctccaaccccccgcgcagccgaaggaggcctcttttgagacgacgatgggcgccgcaacggagaagacggccgaggagatccgccgcgagctccaggagctccagcgccagcaccgcgagatcagcgagcgcctccgagacccccgcggcctacgccgcggcgcgcccgtcgctgcaggacccggcgggccccgcccacttcgcggattccctagaccagctgtggatttggtggaccagtctgcgcctaagcggaggattctatctgcagtggttaaagtggaggatactgaagctaacgaggatgtcaagaatgaagcggaagcagaggggccggagggcggttcggctgctgctgaaggcggtgagaggagggatggtgggttcacgagggatgtgagccacctcatgcccaggagggagtttgatatgtcattgccagaacc

SEQ ID NO: 42149 - DNA, 531 bp, Oryza sativa
  unsure (1)..(531): unsure at all n locations
  Clone ID: uC-osroM202011b01b1
gtacctctgaagctggtgggctccaaaaaagagggtcacataacttggagtaatatatatgcttgtattgggtgtggcatgtaattgtattgggtgggataggtcagtaccaccactttgaatgatgagggtgatgctggacaagggaactgtaaacggaattattcgatgtaaccttcagagagtcatcattacccagtcagaaaattttccagttatatcttgcatgactctataaggtctcagctttacaaatctggggcttaactttagatcctagctcgggcccatctttagatcctaagtttgctctatcactgtctctgtagctttgatagtgctggtctgtagtaaccaaacggttgaatggaagataatcttctttgatgcaatatcataattntattgagctcatgccactgtgtgcacctaaacaagaattatttgatatgaacttttttgcatcttaaatgaaaatttactatgggtgcataagcaatcgtacgaccaaatgatggaggattctaaaca

SEQ ID NO: 42150 - DNA, 412 bp, Oryza sativa
  Clone ID: uC-osroM202011b04b1
ctcttagacatttcaacgttctcctccacagcagcagcatttgcagcagcatctcgtcttcttcaccgcatctgccagcctagcgagcctaatcaggtcttcgtcttcttcttcctcatccccgagccaataccgatttcgcgagctccgatggattccgcgagagaggagacgtccccatgagaggggaagccgagctgtgcgtgtagcttgctgcaattgctgcgcccggtcaagaaaccagccggaatcggcggctgattcccgtggaggaagatgcggcggaaggcggccggagatgctgctctggtaggcggctgcttcttgctgctcctcccacctcttctctaccatggcgcggacatgccgttgggctccttcctcttgccggcgaaccaggcgttgtggtcgt

SEQ ID NO: 42151 - DNA, 400 bp, Oryza sativa
  Clone ID: uC-osroM202011b05b1
ttggacacttgatcagtttagctctcttgctccggtagctgaccactctactatacacacacatatatacttttttcttggtgtattagtaagcacacctcatcgacatcaatggccaccgtagaggttgagaccccgaccaccgtgctggccgaggaggcgccagtggaggcgacgccggcggccgccgccgccgaggtggaggcgccgaaggaggagacgccggcggcgccggccgaggctgtggccgaggaggcggcgcccgccgaggccgaggtggcggagaccaaggaggcggagccagctgcggccgagccggcggcggaggaggtgaaggaggccgagcccgagccggccgagccggaggccgagcctgccaaggaggaggtggcgccagagc

SEQ ID NO: 42152 - DNA, 487 bp, Oryza sativa
  Clone ID: uC-osroM202011b09b1
ttctgggctaagcttctctcaggagtccttgggtgatgttgacgacggcgtacgcgcggccgtccaagccaccagggccggccggagagcggaggcctccgcggctagccaaggagcttggcaggatcgagcccaagaagctcgggattgggctggtcgccggctgctgcctcgctctcctcacctacatctcctttgcccgccttttcgccatctactcgccggtcttcgagagcacgtccttggtgatgaagaacgcaccacctgcgtcgactcagcagaaccctgtgctggctcaacaacagagcaaagaagaggacgagaaagatgttggtgaagatgagacggaccggaaagtgccaagctttgcggagacgacagaaaagaatgaagaggaggaaacagtaacgaaaccattcggggacgaagctgaggccacaatctcctgcgatgagaacggcgttgatgagggcttcttatatgcgcg

SEQ ID NO: 42153 - DNA, 312 bp, Oryza sativa
  Clone ID: uC-osroM202011b10b1
tcctcctctctccagatccacatcctctcctggtcccattctgatcggtggcgcggtcgcgacgaagggaggcggacgtcggggggcgcgacgatggcgactgcgacgggatggcgacgggggccgcggcgaagggaggcggtcgtcgtggggcgcgacgatggcgactgcgacggggggcgccgacgcctagtcccagcttctctccctctctctctctctctctctctctatgtatctctctctctctccattcggccggcgtcacagggcggcgggggagggggtggtcttgctttaatcacttttttt

SEQ ID NO: 42154 - DNA, 452 bp, Oryza sativa
  unsure (1)..(452): unsure at all n locations
  Clone ID: uC-osroM202011b11b1
tttattgctgccgcggcaacgctgatggttgggttttttggagcattggtatgctgcttggcaaggcagaaggcgggaagaagaggcgcacgcgggagaggggtggatacaaatgaggaaagcacacgtggcgtgcgcaggagggatagtagtgtaaacccggtgacatcaccaccagtagcagtgtccccaagtgccaattctggacataaggatccgggtgttgtttccggtgaatttacctttgagcagttggtccatgccacaggcgggtttggagatgacaacctcctcaagcatgggcactctggggatatttaccatggggtctttgagagtggatcccaggttgctgtcaagaaggtcaacgcacagagcgtcaacaagcatgcaggtgaaattgacttctataaaagtatttccatgagaggattgntccgttgctcggacat

SEQ ID NO: 42155 - DNA, 417 bp, Oryza sativa
  Clone ID: uC-osroM202011c01b1
ttatcaccagcagctcaagcagcaacagctgaaacggtttaagatctcatcgcgatgacgaccggcaatggcgacgcaccggtgatcaagaacgcccacagcgacatcgacagcaccaacaagacgctgctcaagagcgacgccctgtacaagtatgtcctggacacgacggtgctgccacgggagccggagtgcatgcgcgatctgcgcctcatcacggacaagcaccagtgggggttcatgcagtcgtcggcggatgaggcgcagctgctggggatgctgctgaagatggccggagcgaagaggacaatccaggtgggtgtctttaccggctactctctgctggcgactgcgctggcgcttcccgaggactggaaggtggtggcgatcgaccccgacagggagagctactagatc

SEQ ID NO: 42156 - DNA, 361 bp, Oryza sativa
  Clone ID: uC-osroM202011c04b1
ctcgtgagcggcagcaagtgttcactgcgttcggcttctttaattatccatctcgggtcctagatctgtaccttattagcggccatgtgcggcggagcaatcatttccgggttcattcccgtcgtcagccgctgcggcggctgcggctgcggctgccaagaagcagtaaggcacgagggtcacggccgacgtgctgaggtcagtgatgctccggaaggggaaggcgtcagcggcttgaagaggactttgaggccgactttcgcgagttctaccgttgcatgagcgactaccaggcggagggaggctgctgcgaggaggaggaggacgaccaccacttgatacttggtggtcctcccgccgg

SEQ ID NO: 42157 - DNA, 363 bp, Oryza sativa
  Clone ID: uC-osroM202011c05b1
tttgatctccattcgtttttgagttcctcgggggctccttttatctttcactcgggggcaagattaagatcggaatcaatgggctcggccgcatcggcaggctggtggccagggtggcgctgcagagcgaggatgtcgagctcgatgccgtcaacgatcccttcatcaccaccgagtacatgacatacatgttcaagtatgacaccattcactgtcagtggaagcatcatgaggtcaacgtcaaggactccaagaccctcatctttggcacgaaagaggttgcggtgttcggctgcaggaacccttaggagatcccatgggctgctgctggtgctgaatacaatgctgagtctactggtgttt

SEQ ID NO: 42158 - DNA, 467 bp, Oryza sativa
  unsure (1)..(467): unsure at all n locations
  Clone ID: uC-osroM202011c07b1
tcttaaccagacactgcacacatcatcatcttgtccccttagaccggcaagaacaacaacaaaaaaaacgcagaggagaggatgcatgcatgatcaatcaaattaagcttcaagcatggggctcctcgaccagctctgggacgacacggtggccgggccgcggccggactccggcctcggcaagctccgcaagtacgcctccttctccccttcctcctcctcctcgacgatggcggcgtcgccgtcgcccatctcggcggcggcggcggtggtcgacgcgccggccgtgacgcgcagcattaccattctccgcccgccggcgctgtccgtgacgtcgccgcgcggcagcgagttgggccccttcacgccgttgtnnnnnnncagcgtcccggactcccccttcggctcagcaccgacgccgaanggancggagggctggaagaagcttgtccgtggggcggcgagga

SEQ ID NO: 42159 - DNA, 226 bp, Oryza sativa
  Clone ID: uC-osroM202011c10b1
tggcttacaagagaagcaaccatccggaagaggatggccatggcgacgtcctgcggcatccaccgtctccttctccgcccgcccgtccgccgcgagcgcggtccggccgtgcgccgccgcggggagggcgagggcgcgggcggcggcgggggagagcggcaagtggtgggcgccgctgctggggtggtcggggaaggccgactacatcgaggccccggcgccggcg

SEQ ID NO: 42160 - DNA, 454 bp, Oryza sativa
  Clone ID: uC-osroM202011c11b1
ttcttccacccccgaaaccactccaaaaccaggccaaatttagcggcgcatggcggcggcggcggtggcggcgaacggcggcggcgacggcgcgcaggcgtccaacgcgcccgcccccaccaggctcgcgtcggtctacagcgaggtgcagaccagccgcctcaagcacgcgctccccctcccctccgtcctccgctcccccttcgccctcgccgacggccccgccagctccgccgccggcaaccccggtgagatcgcgaagctgttccccaacctgttcggccagccgtccgtgtcgctggtgccgtcgccggagccggcgtccaccaggccgctcaaggtcggcgtcgtgctctccggcggtcaggcgcccggcggccacaatgtcatctgcggcatcttcgattacctgcaggaatatgcaaaaagatccgtcatgtatggattcaaggga

SEQ ID NO: 42161 - DNA, 492 bp, Oryza sativa
  unsure (1)..(492): unsure at all n locations
  Clone ID: uC-osroM202011d02b1
tgtcattagcggggagaggagcgggagagagcgggtcggtattattccgagctcggtatccattgaaccgaaccagctctgagtgagagagagagagatcggagctgttgtttcttctcgtttctttgattggtggcggtgttgaattgaattgaattgatcgattgattgtttcttggtgtggtggtggccgcgacggcgagcagcgctccaaggtacatgacctcggcggcgccggcggcggcgcagttcgctgcgccggcgccggcggcgatggggatctacgaccgccggcaccatcctctcgccgccggcgtctggggagaccaccccttcatccgcccggacaccaccgncagcaccagcaacgccgccgncgnctgcatggtcgtcgcgccgtcgccgctaacagagcccaagttcgagagccagctagctctgcctctgcagcatggagacgatcaagacaacgctgcagctctgcaagaatcg

SEQ ID NO: 42162 - DNA, 513 bp, Oryza sativa
  Clone ID: uC-osroM202011d03b1
ttcagatgagtaacatggcaaattctgctaaagttataaattataatcaccaatagggatcgtgggagaaaaggcaaagcactgaagatggcttccagcggtggatggtcaaacttcgaggatcaggctcttgttgtccttgtccacgacttgggtcaaaactgggaattagtaagcgacgcaattaatagcattgagcaattcaagtctgtatataggcaacctaaagggtgcaaggagcgttataaggttctcgtggataaaaattctggtgatggtgccgatagtgcagaggactctggttcatctcaacactatcattttacgttgccaggcattccaaagggaagtgctaggcagctattccaacgacttcaaggaccaatagaggaagaaaacctcaaggcacattttgaacaaatgattctactcatgcggcaactgcacgccagacgtagaaagggtaatagccaggaactcaagtcgatcatacagccacatagttcttatgtt

SEQ ID NO: 42163 - DNA, 232 bp, Oryza sativa
  Clone ID: uC-osroM202011d06b1
atcccatccccgccgccgccgcgccactcccagggccatttaaaggcctttcggcgtcctcctcctcctcctcctcgccgtctgcgcgctgccgctcgctcgatcccaggcggcgccaagaacggccgagggtggcggaggtggcgcggcggatgacgacactatacacgagctcctgcggacgcacgagctgtcggaggggctgctgtcgcaaggggaggagtctaacagc

SEQ ID NO: 42164 - DNA, 492 bp, Oryza sativa
  Clone ID: uC-osroM202011d08b1
gagagaggcaagcaacactagcatcctctgaggtgccaaactgtcccccgcgggtcacatttcttggccatttcttaccttccaagcaccaccaatcttgtccgaggcgagcaagcttagccggtgcttctcagagctaagccaaatcgcgtgccaaatccaagaaaggcacgggaggaagaggaagaagaaggaggggaagaagagcagtcagggcagggggatcagtggcaggctgacacgccaatgggggcagcttcttgttcttcttcttcggcgaagcatctgttcctgctctgcctcctcctcggcttctgcttcgcgttcgcggcgagccagcaggagcagcagcagtcggactcgtgcagtagcgccggcgtcgcggtcgctcatctcgtcctcttcaactcctccgccttccgctgcctgaccgtctggaagcaagaagacttcgtcctgcggtacaagaacaccggagagagccaatggagc

SEQ ID NO: 42165 - DNA, 498 bp, Oryza sativa
  Clone ID: uC-osroM202011d10b1
tgttcaaagcatcaacaactgaagaaggtcgggggtgagatgctgcttaatgctggggacactgagaacagcttgttaactgtgaaatccaaattgcaggaaacagctgaggtagagattgatgtcttaaacaaagagcctcatggtaaagcaggacaagttgatgggaaagagaacggtgtgttggccgtttctgtaaatggtgttaccccagaagatgttcagttgacaaacgagaagttggccagtttgagcgtctgttaagttttttctcatcatttcagccattgaggggtggtgtaaggtgaagggctatataggttgggaaggcagcaatcaaggcaattcaagatccatttgagtttccttgtgagtttctccgttgcttttggttaggacttggaggtggtttcataggagagctagatagttagctgattgtgtctggtgagatgtgcggatagcagtagaggtttttggacttttggttttcaatga

SEQ ID NO: 42166 - DNA, 377 bp, Oryza sativa
  Clone ID: uC-osroM202011e01b1
gcgtttcaatctcgtacgtagcatatctacatcgggggaacattaaaatcactcgcgcgtaggtatagatctgacgcacgtctaggctgtggaggagggcagcgaggcggcggccgccgtgttcgacgtaaggtacgtgcacgacccggtgccgaggtactagctcagccagaggtcgatatacaaggactccccgtaccagatcgtccacgacgagctcctactggacagcagcccgtgcctgaacctagcgtccttcgtcaccacctggatggagcccgagtgcgacaggctcatactcgaggccctcaacaagaactactccgacatggacgagtacccccggaccaccgaactccagaaccggtgcgtgaaca

SEQ ID NO: 42167 - DNA, 435 bp, Oryza sativa
  unsure (1)..(435): unsure at all n locations
  Clone ID: uC-osroM202011e02b1
ttttcctcctccccctcccgagctctacagcggggcggctttagaaacgcgatgagggtctccatcaaaacgctcaagggctccagcttcgagatcgacttcgagcccaccagcaaggtcagtgatgttaaaaagctcatcgaggctacgcacggagacaatgtctaccccgctgatcagcaaatgctcatccatccagggaatgtccttaaaaacgacacaacacttgaagagaccaaagctgaacataacaacttcattgtgatcatgttatctaacaagggaccatcaagtgctgcttcaagtacagctaaagagcccacaaaacatccctgagttgaccgggcgatacccactgcagctgcaacccaaccacctgctccaccagcacctgttagcgagcctgtgactgcaccagtancaactgcaacaact

SEQ ID NO: 42168 - DNA, 407 bp, Oryza sativa
  unsure (1)..(407): unsure at all n locations
  Clone ID: uC-osroM202011e04b1
tttttagattgattccgtgtagatcgatgggggttggtgtggctggtagttccgggccgggagactaattctgatgcgattcgacagcggacggatatttggagagtctgtctctttttgccgccgcctatgattcggagcagcaagcgccgccgcctgacgcccatccccagcgacgccggcaagatgtcgccggattgggcttcgcttgaccaggatctggtggggctgatcggggggcgggtgcttgccggcgacgacatgcgggactacgtccggttccgcgccgtctgctctcactggagcgcaagcaccgtccgcccactcggccgcggcgtcaccgaccggcgttttcacccgcggcggtggatgatgctaccggagggccacggnctctaccccggcca

SEQ ID NO: 42169 - DNA, 523 bp, Oryza sativa
  unsure (1)..(523): unsure at all n locations
  Clone ID: uC-osroM202011e06b1
gttatccacaaaccacctctaccgaggttctgaagtcatacatattcaatgagccaataatggttgatgctggtcggctgcctccacttggtcctgctgctatgttcatgcaaggcactaagcgtatgcctggtacagctgttacaaaatctgttgttgctaccgaacctggtgggaagaagagggaggaaatttttgttgatatcattgagagaataagtgtgacatttagttcaagtggttacatacttacatctgagattgatggaaccatccaaatgaaaagttaccttactggaaatccagaaattcgtctagctctaaatgaggatttgagcataggaagaactggctcttcttcgtatgattacagaagttcttctggaggaggagctgtcattcttgatgattgcaatttccacgagtcagtacatctggatagttttgacattgacagaactctacatttaatnaccaccgatggngaantcgcttgaatgaactanccgattactcaagaatt

SEQ ID NO: 42170 - DNA, 483 bp, Oryza sativa
  Clone ID: uC-osroM202011e07b1
tttccagaaaaaaaaggaaaaaaagagagtcgggggtcttttaaacttcctccgggcgttctcgcggcggcggcggagatggcgtcgttctcggaggctcccccgggcaaccccaaggccggcgagaagatcttcaagaccaagtgcgcccagtgccacaccgtcgacaagggcgccggccacaagcaaggtccaaacttgaatggtctgtttggaaggcggtcaggtaccacccctggttattcctactctacggccaacaagaacatggctgtgatctgggaggagaacacactttatgactacctgcttaatcctaagaagtacatccctggaaccaagatggtcttccctgggttgaagaagccacaggagcgtgctgatcttattttctacctgaaggaagcaacctcttaaaaggagtggagcttgcgtaacatgagacaatcggacaattcattctactagttaataaaaatattt

SEQ ID NO: 42171 - DNA, 488 bp, Oryza sativa
  Clone ID: uC-osroM202011e09b1
ttttggcagcagcgatttcatccaagcaccaggggcgccttcgacgtcgaagccggtctcctgcgcgcggagcggatcgcctctgtcagtcaccagctatacagtatgagttcactggagagtgcaagagcagatcttgctctgcttattttatacctaaacaaggctgaagcaagagataagatctgtagagctatacaatatggctcgaaatttgtgagtaatggacaaccagggcctgcacagaatgttgacaagtcgactagtctagctcgtaaagttttccgactttttaagtttgttaatgatctgcatgctttgattagtcctcctgccaaaggaactccactacccctgatcttacttggaaagtcgaagaatgcactgctatcaactttcctctttctggaccaaattgtatgggctggaaggacaagaatatacaagaacaaggagcgagcagaatttctcagcaagatagcatttta

SEQ ID NO: 42172 - DNA, 52 bp, Oryza sativa
  Clone ID: uC-osroM202011e10b1
ccccgggccgacccacccctccttaccatccccacatcacacccgcccccac

SEQ ID NO: 42173 - DNA, 377 bp, Oryza sativa
  Clone ID: uC-osroM202011f01b1
caacacctagctagcttctgcttgtgtgcgagctactcttgcagctgggtgctatttacagccaaaggtggcgcagcaacagaaattaactgtgtgagacgtctatcagatcgttcgagagaatgggtgtaggaagggttatgaacgatgcgaagccgtacctggcgatgatactgctgcaggtggggttcgtcgggatgtacctggtggccttcgactcgcttaagcgcggtatgagccacttcgtgctcgtcgtctaccgtaacctctttgccacccgcctgatggggccctttgtcctctgggttgagaggcgagtaagaccaagggtgaccctcatcatcttcctgaagatcatggggctcgccatacttgag

SEQ ID NO: 42174 - DNA, 397 bp, Oryza sativa
  Clone ID: uC-osroM202011f02b1
attcgagaaatccgatgggatggttatagctggggatttacagaccgaattgctggaaaagaagatctgtaagacgaatggaggtgcaagaagaagaggctgttattaccctcaggaagttgtgcactttctgaagaaggttggcttctctgctgatacaaccatctacttgacggagacatggtggcacaaaagcctggatactctgaaggaggcatttccaaacacttataccaaggatgatataatgccggccgctaacaaaggcgagttcctgaaatccggggattcataccttgcaagagcactggacctcaaaatctgctctgagagcgacgtgttcgtccctgccatccccggcctgttctacggacatgtcgccggtaagaggatcgct

SEQ ID NO: 42175 - DNA, 543 bp, Oryza sativa
  unsure (1)..(543): unsure at all n locations
  Clone ID: uC-osroM202011f04b1
ctaaccaggcacttctttttggatgctctgctggtggtgtttcaaccatacttcactgagacgagttccgtggattgtttagcggcagtacaaacgtgaagtgccttgctgatgctggaatgtttctggactttgttgatgtttctgggcaacgagaaatgagggacttcttcaatggtattgtgagattgcagggttccggaagaagcctgcctaggtcttgtacctcccgcatggataaaacttcgtgctttttcccccagaatgtggtgccaaacattcaaactccaacttttattttgaacactgcttatgatgtgtggcagcttcaacaaagtgtggcccccaaaagggctgatccgcaaggtctatggcgaggatgtaggatgaatcatgcctcctgtaatagcaaccaactgcaatttttacaaggtttcaggaatcaaatgctcgatgcggtgaggggtttcttccgcgcaaggcagaaacggncttttatcaactnctgtttcgcacattgccaaagtgagagacaggacacat

SEQ ID NO: 42176 - DNA, 521 bp, Oryza sativa
  unsure (1)..(521): unsure at all n locations
  Clone ID: uC-osroM202011f06b1
tttaggaagggtgttggcaaggccttcatcacggcgttttgttcgggagcggtgatgggattcttgctggcatcaaatgggcttctggtgctttacattgccataaacttgttcaagatgtactatggcgatgattgggagggtctctttgagtccatcactggctatggccttggtggatcctcaatggctctgtttggaagggtgggtggaggtatctacaccaaggcggctgacgtcggtgctgatcttgttggcaaagttgaaaggaacatccctgaagatgatcctcggaaccctgctgtgattgctgacaatgttggagacaacgttggtgatattgctggaatgggatcagatctgttcgggtcngacgctgaatcttactgtgctgcccttgttgttgcttccatttcttcctttgggatcaaccatgatttcactgtgatgtgctacccgctgctggtcagcttcatgggcatcattgtctgcttgaacaccactctttttgccctgacttc

SEQ ID NO: 42177 - DNA, 374 bp, Oryza sativa
  Clone ID: uC-osroM202011f07b1
ttctcctctcgcttccttcctcctcctcccgtgctttttcgacgcgtgctcctgcgccgccgccggagaagctccaagcctcctcctcctccgggccgccgggaatggcggggaagcaaggagatgggcgcgaggaggatggcgctaaggtcggcctcccggcgctggatatctcgctcgcgtttccgcaggccacgccggcatccatcttcccgccatcagcatcggactattatcagattgatgatttactcaccactgaagagcagtctatcaggaagaatgtcagggctataatggagaaagaaattgcacccattatggcaacgtactgggagaaagcagagttcccatttcatgccattcctaaactt

SEQ ID NO: 42178 - DNA, 373 bp, Oryza sativa
  Clone ID: uC-osroM202011f09b1
tttaagacttgtcttaatattaaattataacgtgtaacttaaatacaaccatgagtaatactactataaatcggtaattaatcatttgaataaataataaataataataataataataataataataataataataataattaataataataataaataagtaaagattggaattaataataataattttgttgccttaaagtagtaatttaataattgtagatcaaactctaaagtaaatactgttcgaaacttttgaggaatagagcagccattttaaacagtattgctaatcttcttaaattatagaataaatgatatctttaagaaatcagactttatttcttaaagtccgtttcttgactagtgatta

SEQ ID NO: 42179 - DNA, 485 bp, Oryza sativa
  Clone ID: uC-osroM202011f10b1
ttataaacaagattggtggtatgattgaaggggtgatttgttatccgagaggcagtgattcgaataatggacaagatgattggtctttcgaagagggaccccactccgattttgctgggccaacatgcggatgcacagcatgtgtagcgctaataagaaataaccaacttgttgtggcgaacgctggtgattcccgttgtgttatttctagggctggccaggcatacaatttgtcaagagaccacaagccagagcttgaagctgagagagacagaatagtaaaagcagggggtttcattcatatgggacgaataaatggaagtttaaacttgacaagagcaattggagatatggaatttaaacagaacaaattcttgccttctgagaagcaaatcgtgactgcaaatcctgacatcaacgttgttgagctttgcgacgaccaccactctcttgttttagcatgtgacggcaattgggactgcatg

SEQ ID NO: 42180 - DNA, 421 bp, Oryza sativa
  unsure (1)..(421): unsure at all n locations
  Clone ID: uC-osroM202011f12b1
cccgcaccgccgtgcttcgcgagcacggcaccgctgcgcggcgcgaggccgcatttgacaagccgagcgtatatcccacgcccgcccgtccgcatcaccgccggatggccgccggtcgtctcccgtagggcgataggcgggtagatccaaatccggcggcgcgggatcatatacacccctcgcccatcgcagtctccgagtctgcgctgtttcttctggacatcaagggcctcgttctagtttggcgcgactaccgcggcgacgtttcctccctccaggctgaacgcttcttcaccaagctcttctatcaaggagggtgactcggatgcgcactcccccggtggtttacaactattcccgcgtcacctacatgttcatccagcacaacancgtgttcctactaaccgccttccgccagaac

SEQ ID NO: 42181 - DNA, 483 bp, Oryza sativa
  Clone ID: uC-osroM202011g04b1
ttctctgccgccgccgtcgccgccgcttgctcggtactcctcctcttcagcggcgatgaagggacggcaaggccagcgcgtgaggctgtacgtccgcggcaccatcctcggctacaagaggtcgaagtcgaaccagtacgagaacacgtcgctgctgcagatcgagggggtgaacaccaaggaggaggttgggtggtacgccgggaagcgcatcgcctacgtctacaaggccaagacgaagagcaacgactccaccatccgctgcatctggggcaaggtcacccgcccgcacggcaactccggtgtcgtccgcgccaagttccggtccaacctcccgcccacctccatgggcaagaaggtccgcgtcttcatgtaccccagcagcatctaaaagcattcaaggtttcttgcctatgctgcgaaactgatagttgtcaccgtggagggttttatatcagctagtcacttggttaaccagtcaga

SEQ ID NO: 42182 - DNA, 414 bp, Oryza sativa
  Clone ID: uC-osroM202011g07b1
tttaaagtggtttatttcacttgtgtgaatggagtgaagattgtgagttcactggtatgtctactcagatacttcactttttgggaaatgaaggtccaaagacatcagatcctagtaaatacatacgttatatatataacagagtgatacttgaaaatgctactgttcgagctagtgctgtaagtactttggcaaagttcggtgcattggttgactcactcaagcctcgaatttttgtccttctgagacgctgcctgtttgatggtgatgatgaggtgcgtgacagggccacgctttatctcaaattgcttggcggggaagctacagttggtgaaactgagaaggatgtgaatgaatttctctatggttcatttgatattccactagttaacctggagactaggctacaaaact

SEQ ID NO: 42183 - DNA, 362 bp, Oryza sativa
  Clone ID: uC-osroM202011g09b1
tctgttatgtagaaactaagaagacacatcctaagggttttttggaagacgatgcgtgtttcacatctttcgaacaatattacaaggttgtgaaggtgattctgaaatcttttgactactttgggtgaaattaatttgaagatttatttcaagaacatttatggaccttaacattataaagccatttgtttgaagtttcttctgagtataaacaatttgctttatgaaccatggaggagttctcagtatcagcatttgatttctacttggtccagctcgtatctccagtagcatccctttacatatgggcttgtactgtatcataactagctaggatatgggttcatttcaacatatcattt

SEQ ID NO: 42184 - DNA, 522 bp, Oryza sativa
  Clone ID: uC-osroM202011g10b1
tgttcctccctcttgtctcgccctctccctctcgggccgccttgaccgcgacagccgccgcctccgtcttcccctcgcgccgccaccgcctccacctccggcgccgccgccgtcgccgtggcgtagccgtcttcgagcgcctccacctccttctcccccctcgcgtgggcaggctacctcgggagctgggggagaggggactggagcgagaacagcagcaacgaggagaaccggaggaagagggggcaagcccggtggctgaccaaggcgagctcgtcgtcgtcggcgtcggtgccttcctcctccacgtcgtgggcgagcggctcgacggtgatggactgggtgagctctgaggaggccgagctgcaacgcggccgtggcttctccttcctcgtctacgcctggaaatgctagcaattgggcgccatcaggaacttgctttcatcacataagggaactgctacatttgcttatgtggggttactttagcaacataagttacttcaattctctttacaagag

SEQ ID NO: 42185 - DNA, 337 bp, Oryza sativa
  Clone ID: uC-osroM202011h03b1
gttgaccggcgtgctcacccactcccactggaggagcgtgtacacgtgctctgcggtcaacccgccgtcgccgccgtcctccgccgccgcctccatgctcgccacctcgctcgccggctcgcttctcttcctcctcgcgggggtcctcatgctgctcttctgatcgatccatcgatcgatctcacacattttacatgcattcgtgcgtgcaaattggacaaactgttgtactgattgttcgtacgtcgtttcgtcgtcatttctggattttgtttacaaaaaccaaagatttttgcttgattttcttttaatttgtcatgtgtgcagggttataacc

SEQ ID NO: 42186 - DNA, 508 bp, Oryza sativa
  unsure (1)..(508): unsure at all n locations
  Clone ID: uC-osroM202011h04b1
gtttgttcctttttttttttcctcatgtattggggcttttttaacaagaatttggtgtttctgatcttcattccggtaagtgttgccgcaccaacattttatttacatgttttttcttgcagcaaatctgttttgtatggatattgctgtaattggaagaacaaataactgaaggtagtctgtagatgtttgtttggaaaagcgtttccctactcgatgggtgtatatcatctaagtagttagaaacaataacaatatagattgatttgtatcactccataaacattgcacattcaaattcgattgctataagttgaacaaagtatttgtatacaagttttaatttaattttttgtttttttataactggtttttacaacttatacaagtcgaatttcaacatgcatacttatggattgatatatctcatactaatctatttttttggtacttttttatttatttataactatttaagttacatgcgatctatgagtaactgngtcat

SEQ ID NO: 42187 - DNA, 527 bp, Oryza sativa
  unsure (1)..(527): unsure at all n locations
  Clone ID: uC-osroM202011h06b1
ttaggaaatgtgataaaatgcagatagtggcgctgaaggggagggaggcggcgtcggagctgataaacctgaacaaggagacggaggcgtcgtgcagcaaccgcagcgagaatagctccgagatcaacctcgacatctcgcgcacgccgccgcccgacgccgccgcgctcgacaccgccccgaccgcgcaccaccaccaccatggcggcggcggcggcggcggcggcggtggcggcatgatcccgttctacacctccatcgcccgccccgccagcggcggcggcgtcgacatcgaccagctcctccacagctcgtcgggcggcgccggcggacccaagatggagcaccacggcggcggcggcaatgtgcaggcggcgtccgtcgacacggccagcttcggcaacctgctctgcggcgtcgacgagccgccgccgttctggccatggcccgatcaccagcacttncactgatcgatcgatccatggatcccaaccaccaaccaaacaaccattgggcacaacaaacta

SEQ ID NO: 42188 - DNA, 277 bp, Oryza sativa
  Clone ID: uC-osroM202011h07b1
ttctcctcttgctcactctcgtcctccacagggtggctaggaaggcgaccggtaatggcgccggcaagccgaggcttccgccggggccgtggcggctgccggtcatcggcaacctccaccaggtcgcgatgggcggcccgctcgtccaccgcaccatggccgacctggcgcgccggcacgacgcgccgctcatgtcgctcaagctcggcgagcttcgcgtcgtcgtcgccttgtccgccgacgctgccagggagatcaccaagacgcacgacgtcgc

SEQ ID NO: 42189 - DNA, 362 bp, Oryza sativa
  Clone ID: uC-osroM202011h08b1
tttaccagttaggcggttaacttgtatatagggagacgttgaacgcgcgagcgggtcgtcaacgtcttcgctcgatcgtagtagttgccggccggcatcggcatgggcgacggcggggagaagcaggcggcggcggcggaggggtggcggctgagcgtcaacgacttccagttgccggagcggcccaaggacccgcacttcgtcaagagggtcatcaagcgatgccacggaaagcatcggaaaattgcaaaatactacaagaagcaggaaaatctcctgaaggatttcagcgagatggaaaccatgaatgagattggttccttagatcagaatgctcctactgaggaaagagtgaggcaaat

SEQ ID NO: 42190 - DNA, 418 bp, Oryza sativa
  Clone ID: uC-osroM202011h09b1
tgtagtttctgaaattttctacctgataaggtgcggaaattttgtagtagtaggggatatcttattagcttctgaaatttcgtagttcagcacaacacctagctgataggctaaacagtcctctgaatttttttaagaatacttctttgaatggctgaaagatggatggagaatcttcattgagagagatgtttttcagagctctgaatgtcattttgtccaagtgaagccattttaaaattttcattttggttggctggacagtttgatactctgttggcatcgaagctctgaaatattgtgaaagttgtggggtttggtgaggtcgaaagataacagctttggtgtaatttacaagcgcatacaaaaaacttactaacaactgcattaaggctgcgttctttcacgggagataggg

SEQ ID NO: 42191 - DNA, 544 bp, Oryza sativa
  Clone ID: uC-osroM202011h10b1
ttatgctgccggtgaacgcgcccaagtgcgcgcaccacaacaaccactacgacggcgccatgaacttcatgcaccgggacgaggaggtggactactacccatcgcgccacgcgccgctccgccacgcgccgccgacgcccatcacgccgcgccccgtggtggggaggaggcagaaggcgacgatacacaagcagaacgacttcaagcagcccggggagaggtacaggtcgtgggcgccggatagacaggagaggttcatccgccgcttcgccggcgagctcgcgcaccccaaggtctcccctgagctccgcgccatctgggtcaactacctctcccagtgtgatgagtcgttgggggtgaagattgcgaataggctcaacgtgaagccaagcatgtgaagaaactaaggcacaagaatgcatcatctcttgttaattaattggagtactaccaaccaaataaggccagacaatgtcagatgcacgcatcttctgttgtcggtgggccatcttttgaatgcatcctattggtaatacctagacat

SEQ ID NO: 42192 - DNA, 391 bp, Oryza sativa
  Clone ID: uC-osroM202011h12b1
tgcatcttcttcctcccgcctctcgaccgcgggccgccttcgacgccgccggcgcctccgaatgcgaagcttggagagttcgagcacgggcatggcgtcctcggggggagcggcgatctcggcggggcccacgccgccgttggtggcggcggcgtcgtcgtcggtggactggcacctgcggccgccgaacccgaagaacccggtggtgttcttcgacgtgaccatagggtccatccccgccggccgcatcaagatggagctcttcgtcgacattgttcccaagacggcggagaactttcggcagttctgcactggagagcacaggaaatcacgtttaccacagggatataagggttgtcagctccatcgagtgatcaaagatttcattgat

SEQ ID NO: 42193 - DNA, 318 bp, Oryza sativa
  Clone ID: uC-osroM202012g01b1
aaccttttgtatggacttcatgaagacttgtaccgtgtgaaacataggccttacatccagcccacacacgctaatggcctatcagataatgaggttggtgatgaatgatagcgcgctcatattgccgaaacaatgaatcaggggggtctatgccaccgaccgtgcacaacaagttccgtctgcgccggctgctgaaaggcttcaatgactgttggaccttccatgtatctatcgttgcgaccaccgatgagagtcgccattagcatgaccgttgtggaccttacttttgatgggagttgtaccccaccacgattcact

SEQ ID NO: 42194 - DNA, 476 bp, Oryza sativa
  Clone ID: uC-osroM202012g03b1
tttaactgcaggctaggacacatcgaggatgctcagaggcacctctcactggcgacccctcagcctgacctactagagttgcacaaattacaaacagtggagaagcaccttgggagatgtatggatgcacggaaagttggggactggaagagtgtgttgagggaaagtgacgcttctattgcggcaggagctgactgctctgctatggttggatcccatctttcttgtactatggtgttgagtagccctttcttgattaaagggcatacacttatgtaattcaccatttgcagctcttcgcctctagagcagaagctcttctacggctcaatcagcttgacgaggctgatctggcgatctcgagtgcttacaagttggactactcatctttatgcacctcagacaacaaattctgtgggttccttgcccatgcatacctcttttatgtgcatgcccaaattgacatggcattggga

SEQ ID NO: 42195 - DNA, 382 bp, Oryza sativa
  Clone ID: uC-osroM202012g07b1
tttaattaagcgagggagtgagagctagctgactcatgctcagccaactgatcgcgagctgtgacgaggtgatcaccatggcgtcctcgtcgtcgcttcttgttcgtgggagagcgttcgcgctggttgtggctgtagctctggtggctgctcctcgccggattaatggcggcgccgccgggccggcggcgaggacgaacgaccccaactggcacgtcttcagcgtcagctcgctgctgccgagctcggcctgcactgcatcgaaagcggcgtccaactcgtcggctctcggcgtcgtgcaccggcacgggccgtgctcgccggtgcaggctcgtcctcgcggcggcggcggcgctgtcacccacgccgagatcctggaacg

SEQ ID NO: 42196 - DNA, 383 bp, Oryza sativa
  Clone ID: uC-osroM202012g08b1
tttctcctccccggccggtaggcagcaacaagctgtaagcacaagtatcgaaatggttagcggtgatgtaggagtagtagtgtactacctgctgctagtattagtggtggtgcaggggtgcaaaggcagcagcgcggtgcagggtgaaggtcggtggtacaacgagagcgaggccatcggtggtgcggcggcgtgggggaacgcgaaggcgacgtggtacgggcagccgaacggcgccggggcggcggacaacggcggggcgtgcgggttcaagaaggtgaaccagtacccgttcatggggatgacgtcgtgcgggaaccagccgctgtacaagggcggcaagggctgcggctcctgctaccgcgtcaggtgcaatcgaaacc

SEQ ID NO: 42197 - DNA, 484 bp, Oryza sativa
  Clone ID: uC-osroM202012g09b1
tggtgatgatgacggggacgaggatggtgactttggggaaggcgaagaggacgtttcagaaggtgagggatatgataatccaaaaggcatcgataacaacaagaaaagaggtgagcctgaggaaaatggtgaggaggatgaggaagagcctgaaggccaggagggtggtggaggtgatgacgacgatgacgatgatgatgacaatgaggatgacgacgacgatgatgatggtggtgaagatgatgatggagtagatgaggaagaggaagatcaggacaatgaggatgatgaggaagatgatgatgaagactcacttcagcccccaaagaagaggaagaagtgaatatcttcatgcggctatagttaccaacttaccatgcgctgagctgtgcttggttttcgtcatgttcttggaatcgaacttgcattaaggagttaagaaaaaagggctccacacgttcagtaagggtggatttgtaggaac

SEQ ID NO: 42198 - DNA, 432 bp, Oryza sativa
  Clone ID: uC-osroM202012h01b1
ttcgaccaccgattccgctcgcaacccgggggcatcccaccaactcgggggcctcctcggtggttctcctctccgctcctctataaatgcagcccgatcctcgctgctttttcttcgttgaggatggtcccatggcttccttcctcttctcgcgcggtcattcttccccttttcccctccgccgcgggtgggctggtaagtcggtaggtaagggatcaatcggtttcgatctcacctcgttcgctgccgtttgttgattgatgatcaggcgcaccaactagccggatagattgcccgcttgctcgtccttttctggtgcttgatccggtccggtgggggggggtctagtttccgcgatttgcttctgctgttgtgttagttttctgaacacagtatctctttcgattggtttatggctaattgtggtttgct

SEQ ID NO: 42199 - DNA, 426 bp, Oryza sativa
  Clone ID: uC-osroM202012h02b1
acgcgtgttaggtggtgccatgtgtggccacaggggggtgtattttaaacctcagaggggttgtaacgtctacaactactacaaccgcaataaggtcctccgcaacgaggccgaggctgcccggcaggagcagctccagcgcgaggcctaccgccgtcgcgagtcgggcctccgcctcgccgcgctccgccgcaaccgctgactgcagtccgccgacgcggtgcccctctctccccggccgcccacctacgccgcggatccggccgacccgtcccccgccgccgacgacttcgactgaggccacatcaaccttttctccggcgtcccctgcgtctccggcggtgctgccgacttcttgagtctcgcctacgccgacggtggtaggggcgccgccagggagcgggagccttccgcgaaccctaaccc

SEQ ID NO: 42200 - DNA, 450 bp, Oryza sativa
  Clone ID: uC-osroM202012h07b1
ttgcttctctcctcctctaatctcaaggctgtgtctcgtgaacctcgcatgggcactcgccatgggcaagattaagatcggaatcaacggtttcggaaggatcgggaggctcgtggccagggtggccctccagagcgaggatgtcgagctcgtcgccgtcaacgaccccttcatcaccaccgactacatgacctacatgttcaagtacgataccgtgcacggccaatggaagcacagcgacatcaagatcaaggactccaagactctgctcttgggcgagaagccggtcaccgttttcggcatcaggaaccctgacgagattccgtgggctgaggctggtgctgagtatgtcgtggagtccaccggtgtcttcactgacaaggagaaggctgctgctcacttgagggtggtgccaagaaggttgtcatctcagccccgagcaaagatgct

SEQ ID NO: 42201 - DNA, 423 bp, Oryza sativa
  Clone ID: uC-osroM202012h08b1
ttgtagctagtacagtactgatctcctgggtacatgggaaaggagaaaggggcttgctacagtacaaacaacagcagcaaagcaccggcgacggcgaggccgacgaccaaggggtcaacaacagcgtccggcaatggcaggccaccgccgacgacgctgcacgacgtccccgacaagctcctggagctcatcctccaaaacctcgattcgtctctctcgctcgtccgcgccgcggcgacatgccagcggtggcgccgagtcatcacccaacagagcttcgtcctcgactacgacataccaccgcatcagatcgtgggccactaccaccaccgtctccatccaccatccttcactactcccaaacccagaggctgctgcagcagcgtcgcgttcgtccccacctcgccggagtttctcaccacc

SEQ ID NO: 42202 - DNA, 459 bp, Oryza sativa
  Clone ID: uC-osroM202012h09b1
ttctttgcacctcagttcagtggatacaacgaacatgattcacaggagtgggtggcattcctcttggatggacttcatgaagacttgaaccgtgtgaaacataggccttacataaagtccaaagacgctgatggtcgatcagatgatgaggttgcagatgaatattgggccaatcatattgccagaaacaattcaatcattgttgatgtatgccagggacagtacaagtcaactttggtatgcccagcctgtggaaaggtttcagtgacttttgacccattcatgtatctttccttgcctctacaatttacatcaacccggagcatgaccgttatggtctttacttttgatgggagtactccaccaacaccatacactgtaaatgtacccaagcaaggaaggtgcagagatcttatccaagccatcagcaatgcatgctcactcagacatggggagaga

SEQ ID NO: 42203 - DNA, 533 bp, Oryza sativa
  Clone ID: uC-osroM202013a01b1
cattggtctgataagtctttgatttgctagtaccggcatcgcctgcttcgctttcgtcacgttcttgatttgggcgggcgcggagatttagaacggtgctgaatttacaatcttgggaccaagaggagaactactctcaatgatggaaatggtattgccagtcgcgaatgctacggctgcggcacttgcacgggtttctgctgtgttcaatgccccacttgcccgtgctgttgtctttgggattcatattgatggacatttggttgtggaagggcttctcattgctgccatactgtttcagctctccaggaagagctacaaacctccaaagaagccactcactgagagggaggttgatgagctctgtgatgactggcaaccggagcctctatgcccacccatcaaggaaggagcacggatcgacacgcctacattagaaagtgctgctggacctcatacaacttgtgatgggaaagaagttgtaactttgcatcagcaaactaccttggtttgattggcaatgaaaagataat

SEQ ID NO: 42204 - DNA, 477 bp, Oryza sativa
  Clone ID: uC-osroM202013a02b1
cactatttatctcctcgcctagggtttcacgctctccgatcccgcggcggcggcggcgagaagcttccagtcgcctcggcggcggcgccggccagaaagatggctggtggttttcgagtactgcatcttgtcaggccctttctggctttcctgccagaagtacagagtgctgataggaaaataccattcagagaaaaagtgatctataccgctatctctctcttcattttcctggtgtgcagtcagctcccactctatggaattcattcaactactggagcagatcctttctactggatgcgtgttattcttgcatcaaaccgtggcactgttatggagctgggtattaccccaattgtgacatctggaatggtaatgcaacttctagtgggatcaaagattattgaagctgacaacagtgtgagagaggaccgtgccctttttgatggcgcacaaaagctgctgggtatcttgatt

SEQ ID NO: 42205 - DNA, 391 bp, Oryza sativa
  Clone ID: uC-osroM202013a04b1
ctcgtcttgaaatggcgacttgctccgctgcttgcgctcgcccagccgtcgtcgtcttcgcgtcgccggccgccgcgcggcggcgcgccgcctcctccgtctacctccctggtcggcctctgcgcggcggcggcgtcgtgcgatgcagcgctgggcctgtaagcggtgggatgatctcgaagaaggtggcggagctgtgggcggcggcgaggagcgcttcgccggtggcggtgatcgccgcggtggccggagcggcggtggtctacaaggtggggtccagtctgctcgcgccgcctcctccgccggcgaggccccgggaggagcccagcgaggaggccccgccgcctccggagccggtgcaggtgggggagatcacggcggaggagttgct

SEQ ID NO: 42206 - DNA, 425 bp, Oryza sativa
  Clone ID: uC-osroM202013a07b1
ttttaaaccctagagccgctcctcctcctcctcctcgcctaccccgaaacccaaatcccccccaaggcggacgcgcccgcaaagggtcgagcgcgctcatggctcgcgtgtacgtggggaacctggatccgcgcgtgacggcgcgggagatcgaggacgagttccgcgtgtttggggttctgaggagtgtatgggttgctagaaaaccaccaggttttgcctttattgactttgatgaccgcagggatgcagaagatgcaattcgtgatttagatggcaagaatggatggagggttgagctgtcaaccaaagctggtagtggtcgtggccgagatcgttccggtggttctgacatgaagtgctatgaatgtggcgaacctggtcattgtgcacgtgaatgctcgttacggattggatctggaggc

SEQ ID NO: 42207 - DNA, 438 bp, Oryza sativa
  Clone ID: uC-osroM202013a08b1
tgctaatcccaccgcttccctttcctctcctctccccgagaagaagagggcggcatccatggcgcccaaggcggagaagaagccggcggcgaagaagcccgcggaggaggagcccgcggcggagaaggccgagaaggccccggcggggaagaagcccaaggcggagaagcgcctccccgccggcaagggcgagaagggcagcggcgaggggaagaaggcggggcggaagaaggcgaagaagagcgtcgagacctacaagatctacatcttcaaggtgctcaagcaggtccaccccgacatcggcatctcctccaaggccatgtgcatcatgaactgcttcatcaatgatatcttcgagaagctcgccggagagtccgccaagctcgcgcgctacaacaagaagcccaccatcacctcccgggagatccagacccgcgt

SEQ ID NO: 42208 - DNA, 535 bp, Oryza sativa
  unsure (1)..(535): unsure at all n locations
  Clone ID: uC-osroM202013a09b1
attggaagcgcttgttgagaaaataaataagttaacatcatctgctgagtcacatttgcagagagaattggctatgtcctctagtcctattgaaaagctcttcagtctcattgatgaagtttatgcacttcggcacgaagtagataccttgagatatgaaaatgaagatttacatttaaatcttgaatcccatactcgtgaaatggagcagctaaaggaggcatccagaaatagtgactcaaaccgcagggagctggaatcaaagagtagtgaactacttgagataacagttagtatggaacgaatgattcagcgattaggatatcttggaggaaaagaagcactagaagataacaagcctacaagcacacaagcactcttatcaaagctggaaaaactaataattgcctcaaatgtggaatctgggaatgccaagtctgtaatacaggaactgggagcaaagctgcaggtcagggaaaaggcaattgatgagtcgtcaacanaagttaagatgtttgatgacttgcatcatgct

SEQ ID NO: 42209 - DNA, 466 bp, Oryza sativa
  Clone ID: uC-osroM202013a11b1
tcgctctcctcctcctcctccatccattcccctcctcctcctcctcctcccatgcatgggaggccgtcgaggccattagcttcctcctcgtcgtcgtcgtcgtcccgcgtcttctccttcttcttggcgccgcgggttttcttgttcttggtggtggtggtggtcgtcgtcttcttgccgggtcggtcgtcttgctggtggctggagggcacggaggagttggaggaggagatggggtttgccggggactgctcgccggtcagcggtggcgggctcagtgaaaacggcaagttcagttatgggtatgcaagtgctcctgggaaaagggcttcaatggaggatttctacgagacgagaatcgatggtgttgatggagagaccattggattatttggcgtattccacggccatggcggagctcgagccgctgaatatgtcaagccgcaccttttcagcaattttaatt

SEQ ID NO: 42210 - DNA, 351 bp, Oryza sativa
  Clone ID: uC-osroM202013a12b1
aatgagtgttgatgttgcagttctttttcttggctcgaagctacaatcgtcagacatttctaaagataagcaagctgattctactttagtagacacgctgaagaactcgtttgcaagctccgagttttcgatggcattcccctacattgccatgtcagatgatgacaaattggagaagtcattgctatctgggtttgctgagaattgcaacaatggtttcggagataatcatatcacctacacagacacctgttctgtaagtgaagatctgaacaaacatcacaacatggattccattcatggattggtggcatcacaaactaaaaagaacccgagtggacagactgatct

SEQ ID NO: 42211 - DNA, 477 bp, Oryza sativa
  Clone ID: uC-osroM202013b04b1
atttattgtctgctgccatcactgaggaagtgaatcaagaacaaacagctgctagatttgtcacgcgtgaagctcaggaggggcaaagagttgagttgaggttcctcaataagttgaaccctctcgtttttacaaaggaaaaaattacagcggaggatggtacagctatcaaaattgccatagttagggataatcagataattacatctggtccactttcttctgcaagaattgaaattttggctctccatggtaacttttatgatgttgtccctgataattggaccgaatctgagtttgatcaccgcatagtaagtagttcacaagggcccgcgttaggaggagtttgtcaagtcaagctgaagaatggggaggcctctccttctgatgtatttttcaatataccatcttcgaagactgaaagtggaaggctcattctagcagcaaaagttcatacaagtgacaatggtgggcttc

SEQ ID NO: 42212 - DNA, 506 bp, Oryza sativa
  Clone ID: uC-osroM202013b06b1
gcggattgctctgaacgaggactgcgtggagttcgagatcttccctccgggccacctctactccagcgccgccggcgggctccggcggtggtacaagccgcagtggttcgccgagaacgtaccggcgacgccgtaccagccactcctcctcagagaggccttcgagaaggccgtcatcaagaggctcatgaccgacgtgcccttcggcgtcctcctctccggcggcctcgactcctccctcgtcgccgcggtgaccaagcgccacctcatcaagactgaagccgtcgagaagttcggagctgagctccattccttcgtcgttggccttgagggttcccctgacctgatagctgcacgagaggtcgctgaccacctaggaaccatccatcacgagttccacttcactgtccaggatggcatcgacgcgatcgaggaggtcatctaccacgacgagacgtacgacgtgacgacgatacgggccagcacgccgatgttcctgatggcgc

SEQ ID NO: 42213 - DNA, 96 bp, Oryza sativa
  Clone ID: uC-osroM202013b08b1
gcatgctgcagacgcgtaacgcatcggaaccagaaaccgtgttcttatgatgcgacacacagcatcagacatgccggggaactgtatagataatca

SEQ ID NO: 42214 - DNA, 507 bp, Oryza sativa
  Clone ID: uC-osroM202013b10b1
tcataacccactcctcctccccatcgccgccgccgccgacgagggagatggcgacgctcctccggcgatccgtcggccccgcgcgccagctcctcctccgcccgcgcccgctcccgctcccccacgccgcctcctccacccgctccttctcccgctactactcccgcgacgacgtctcgaggtacgaggcgctgagcacgccggtgaactggggggtgagcatcgtgccggagaagaaggcgttcgtggtggagcggttcggcaagtacgtcaagacgctcggctccgggatccacgtgctcgtccccctcgtcgaccgcatcgcctacgtccactcgctcaaggaggaggccatccccatccccgaccagtccgccatcaccaaggacaacgtctccatccagatcgacggcgtcctctacgtcaagattgttgatccctaccttgcttcctatggtgtggagaatccaatttttgcagtcatacagcttgcccaaacaactatga

SEQ ID NO: 42215 - DNA, 475 bp, Oryza sativa
  Clone ID: uC-osroM202013b11b1
ttattctccctcatatggttattattgtaattatttaccctttaattcaacctctgctattacttttgtggtgctctcaagtacgttgatggtcataactgctctatgtggcatagtgatctacttctatcgctcaaatatgcttatacaatcaactaggttgcttattttagaatccattctttttggttgtttaatgcaatatgtatctgtttttcttcttctgggacctataacgagtacaattaattgcgtattgtgggtttgggttttctccattggatttgtactggtaatagctggtctattaactcgtatagctcacattagagcgttaaacaaacctaaaattcgacttcaaatcaaaactattaccttaatttttgcctggtttgatcgtttgcatggggatctacaagtcttgggttatcttggagccatattggcttcttaatgttatggacatttttaaacc

SEQ ID NO: 42216 - DNA, 486 bp, Oryza sativa
  Clone ID: uC-osroM202013c02b1
cgtcacttctctcatcttcacgcaacgaacagcagcagcagctcaagctaagctaagctaaagtactacgtgttctttcgtcttcgtcggcgccggagtttgattcgtcggagctagctagcaagaggaagaagaaaatgttggccatattccagaagcaggtggcgcacgcgccggcggagctgaacagcccgcggagcagcgcggcgaagcccaagaaccccgacgagatcctcagggacttccacgccctccaccccatcgaggccttctccacctccttcggcggcggcgccgccctcgcctgcgtcgccggccacgcccgcaatggcctctctggctacgagaggatgttctgtgggctggatgacatctactgcgtgttcatggggaggctggacaacctgagcagcctgattccgcagtacgggctgtgcagccgctccaccaacgaggcgctgctcgtcatcgaagcctaccgcaccc

SEQ ID NO: 42217 - DNA, 510 bp, Oryza sativa
  Clone ID: uC-osroM202013c03b1
catcatttctttttagtgctaaagatgaatccagtcttttggaagactgcctcttggcatcagttaaggttcttatgaacttagcaaatgacaacccatctggttgtgaattgattgcgtcatgtggtggacttaacaccatggcctccttgatcatgaagcatttcccctcattttgttttgtcgtggacaacaactataacacgagagatggagcatcttcctgtcgagatgtcaatcttgatcatgagttatcatcttctcaaaacagcaaggcacaccaggtcaaaattaagcaattgcgagatcatgaacttgattttctggttgccatattgggcttgcttgttaaccttgtagagaaggatagccttaatagggtacggctttcatctgcccgtgttcctgttgatctatcttagaatccacagagtgtagagacacagagagatgtcatagcactcctctgttctgtattcttagcaagtcaaggtgctagtgaagcttctg

SEQ ID NO: 42218 - DNA, 599 bp, Oryza sativa
  Clone ID: uC-osroM202013c06b1
cctctcttcaaccacgaccgcggccggccggcgaatcgcctcgattccggcgtgcgaattcctccacctcgccgccgccgctgctcgcgaccgatcttcaccttccgcttccccccccctgcagccgattggactcgatcctatcctatcctatcctatccccgaacgggcgatctggtaggcgagagagaccagccatgtcgggggtgttcggcaaggtgttcgggaagtccaaggcgcagagccaggccaccgcgctggcctccatcgacaagctcagcgagactcttgaaatgctggaaaagaaagaaaatttgctagtgaagaaagcgaatcttgaggttgagaaggccaagaccttcactaaagcgaagaataaaagagctgcaatacaatgcttaaagaggaagagattatatgagcaacagattgagcagcttggtaatttccaattaaggatacatgatcagatgataatgctggaaggtgcaaaggctacaacagagactgttgatgcattgagaactggagcatcggcgatgaaagcaatgcacatagcgaccaatattgacgacgttgacaagaccatggatgaaatt

SEQ ID NO: 42219 - DNA, 542 bp, Oryza sativa
  unsure (1)..(542): unsure at all n locations
  Clone ID: uC-osroM202013c08b1
cctagctactaagggaagattacttggcacagaatgcatttaccccatatgacaagttctgtccattctacaagtctgtttggatgatgcgcaacattattcatttcaatacattagcaaatcaggctgtggagcgtgcagctaatgctgatggacaaaaaataacatacagtgtcataaagcatcgtatgggtgatctattttatcgcctagtatctcaaaagtttgaggaccctgcagagggtgaagatgtcctagtcgcaaaattccagaaattgtatgatgacctcacaaccggattccgcaacctagaagatgaagctaggtgaagtgctgtaaattgaggatcacattcgtgtaaacaataaaatatcaccagatattcgaagcgagttggggcaatttattttgcttcgcgtgaggttgtagatgtgaattacgtttcagaatcatcatattttccttctgcatcgacactgctgctgctttttgtagctttctgttggacctncggtgctcgatgaaggcattctttttgtgta

SEQ ID NO: 42220 - DNA, 531 bp, Oryza sativa
  Clone ID: uC-osroM202013c09b1
tatgagattagacgaacgagttagataaacaataatagagatatactactactagtactaccaccagggggacaatcatgctatccaaacagctgacctccaggctcaaagaggagcaagaaaaagaccaacatcagctcaatgtagctcagtgtgatcgtctcattcggaccgtatcgtgcaagcacgaggcaaatcatgcaatcaagaaagtcaatatcaatgtgttgcagttgttcgacgacatacgcttgtacgtgccgcccagctatgttgtcctaacgagcgggaagacatcgggaccgggttctaggagtggtgagcaatcgccaccctcggtgatagtggccgatcagaaagagagtgcactatcgtcgccatccaagtcatcagagacacaggcacagccagctactagtacaactggcgaagtgcttgaggttaatttcaaagacgtgctggcgcatatcatagacagtcttagtccgtctaatgtcagcagctggtttagcttgactctacgtcgacttc

SEQ ID NO: 42221 - DNA, 519 bp, Oryza sativa
  unsure (1)..(519): unsure at all n locations
  Clone ID: uC-osroM202013c12b1
tgtctcactcgccgctcaagcgccccatcgccgagtacctccgctacggcgtcatcaacctcgacaagccctccaacccctcctcgcacgaggtcgtcgcctggatcaagcgcctcctccgcgtcgacaagaccggccacagcggcacgctcgaccccaaggtcaccggcaacctcatcgtctgcgtcgaccgcgccacccgcctcgtcaagtcgcagcagggcgccggcaaggagtacgtctgcgtcgcgcgcttccacgccgcagtccccgacaccgcccgcgtcgcccgcgcgctcgaggctctcaccggcgccgtgttccagcggcccccgctcatctccgccgtcaagcgccagctcagggtgaggaccatctacgagagcaagctgctcgagcacgacgccgaccggcacctcgccgtgttctggatctcctgcgaggcccggacctatgtcaggacgctctgcgtccaccttggcctgctgctcggcgtcngcgcgcatatgcaggagctgc

SEQ ID NO: 42222 - DNA, 453 bp, Oryza sativa
  Clone ID: uC-osroM202013d01b1
ctctcttctcctctcttccatcgccgctgctcgcttcctccccctctcccacgaaagatggcgtctcacattgttgggtacccccgcatgggccccaagagggagctcaagtttgccctggagtctttctgggatgggaagagcagcgctgaggatttggagaaggttgcgaccgacctcagggccagcatctggaagcaaatggctgacgctgggatcaagtacatacccagcaacaccttctcgtactatgatcaggttcttgacacggctgccatgcttggtgctgtcccagagcgctactcatggactggtggagagattgggttcagcacctacttctcgatggctaggggcaatgccactgtccctgccatggagatgaccaagtggtttgacaccaactaccactttatcgtccctgaacttggtcccaacaccaagttcttctac

SEQ ID NO: 42223 - DNA, 512 bp, Oryza sativa
  Clone ID: uC-osroM202013d03b1
ctgggctggccgtgccctcctgtcagtcctagctccagctagaatccctccttgttcatccaccaccaccatccacatgattgcatttgtgcagattcctggagaattaagctgtcctctcatgccgatctgacacaccttgttgttgttgttgctgctggttgccgcacaaccgaaaggggggattatttggccctctttctctttcctttcgcaggaagatttggtgattcttcttctgagggctcctctaaggatttgggaggatggggaagaaggggaagtggtttggagctgtcaagaaggtgttcagccctgaatccaaggagaagaaggaggagagactgaggagaaaattagcagctagtaacccgaacccgccagatctaaccccttcggcttctctggaagtcaatgtttcggtgccaccccctccaccttctccacctgttcaacagattgaagaggttaaggtcccttgagttgagcaggagcatagcaaacatgtcact

SEQ ID NO: 42224 - DNA, 505 bp, Oryza sativa
  Clone ID: uC-osroM202013d04b1
atcctctccttcctcttcctctgctcactcagctctcccccgcgcgcgccaccgtcgtcgccatgtcgggcaacatcgccttcggccgcttcgatgactccttcagcgcggccttcctcaaggcctacgtggccgagttcatctccaccctcgtcttcgtcttcgccggcgtcggctccgacatcgcctacaccaagttgaccggcggcgcgccgcttgacccggccgggctggtcgccgtggcggtgtgccacgggttcgggctgttcgtggcggtggccatcggcgccaacatctccggcggccacgtcaacccggccgtcaccttcggcctcgccctcggcggccagatcaccatcctcaccggcgtattctactggatcgcccagctcctcggcgccatcgtcggcgccgtcctcgtccagttctgcaccggcgtggcgacaccgacgcacgggctgtccggcgtgggcgcgttcgagggcgtggtgatggagatcatcgt

SEQ ID NO: 42225 - DNA, 526 bp, Oryza sativa
  Clone ID: uC-osroM202013d05b1
tagatcgcgagcggccttcttttttttttttttttgccataaagtacttaattcttaaagcaagcttgatacattatatgattatacaaataaaagaatatactgtaggtaaagatgtaatcccacggtttataacaacacatcggcaaattattcccccaaaggcacaagtatagtaaatcaattcaaaataactcacagttctcgtgtcaaggtggattacagtggttgtacacaatgcactagcaaaacacctctagtcagccatcttgttcaggaggtggatcatactcctcgcaagcctattccctgggtcaattttcagaaccaaacggaggtcctctgcaccaagcctgtatttctcagagctctcatatagaagggcacgttggacaagcaccgaaacattatccttatctttctctagtaccttcgaacagtcggcaattgccttcttgtactccccaacctcctttgtagatgaagcccttgatgacagcacctctacaatgtcagcatactttcc

SEQ ID NO: 42226 - DNA, 481 bp, Oryza sativa
  Clone ID: uC-osroM202013d06b1
ctcgccgtcctgtccgaggtgctctcggcggtgttctgcgaggtgatgaacggcaagccggagtacaccgaccacctgacccacaagctgaagcaccaccctgggtcgatcgaggccgccgccatcatggagcacatcctcgccgggagctcgttcatgagccacgccaagaaggtgaacgagatggacccgctgctgaagccgaagcaggacaggtacgcgctccgcacgtcgccgcagtggctcggcccgcagatcgaggtcatccgcgccgccaccaagtccatcgagcgcgaggtcaactccgtgaacgacaacccggtgatcgacgtccaccgcggcaaggcgctccacggcggcaacttccagggcacccccatcggtgtgtccatggacaacgcccgtctcgccatcgccaacatcggcaagctcatgttcgcgcagttctccgagctcgtgaacgagttctacaacaacgggc

SEQ ID NO: 42227 - DNA, 417 bp, Oryza sativa
  Clone ID: uC-osroM202013d07b1
gcactggaaggttgtatcagtgtacatcaatcgaatgggcctggtaaatgttcaaactgctttcgaatgtagtaaaccggcatggtggttgtgcgcttttgcttagctatgatggcatgtttacaggtcatgctcaaaatgaaaagccggcatgttgctgggacaatcaccaagaagaagaaaagtaagtggcaaactagcatgcttgtgaaaacagtttactaccccctccatggcattgaggttgatccatccgtcactgtgcaggtgtggtgatagatgtctgcaaggatgtcgcggcgtggccaggccggcacctgctggaggacggcgagcaccgccgctactttggcctcaggacagcggagcaccgggtaatcgaattcgagtgcaccagccagagggagtatgagatgt

SEQ ID NO: 42228 - DNA, 527 bp, Oryza sativa
  Clone ID: uC-osroM202013d08b1
tcttatctttttcacggacaaattcggtgtcagatcaatcaggaacagtgaacatgagatgatgtctgcactgtacctccaagtcagtattgtgagtcaggccctcatcttcgtcacccgttctcgcagctggtccttcatcgaacgccctggtcttctcttggtcactgcattcatgcttgcacaactggttgcgacattcctcgctgtctatgccaactggggctttgccaggatcaagggcattggctggggctgggctggcgttatctggctttacagcattgtgttctacttccctcttgacatcttcaagttcttcatccgctttgtgctgagtggaagggcctgggacaacctccttgagaacaagattgcattcaccaccaagaaggattacggtagggaggagagggaggcacaatgggccaccgcacaaagaacacttcacggccttcagccaccggaggtcgtcttcacacgctcttcaacgacatgagcagctaccgcgagctctctgagatcgc

SEQ ID NO: 42229 - DNA, 450 bp, Oryza sativa
  Clone ID: uC-osroM202013d10b1
tatttttctccccaatctcgcgaggctctcgtcgtcgaatcgaatcctctcgcgtcctcaagatgcagatctttgtgaagacattgaccggcaagactatcaccctcgaggtggagtcctctgacaccatcgataatgtcaaggctaagatccaagataaggagggcatccccccggaccagcagcgtctcatcttcgctggcaagcagctggaggatggcaggacccttgctgactacaacatccagaaggagtcgacccttcaccttgtcctccgcctccgtggtggcatgcagatctttgtcaagactctgaccggcaagactatcacccttgaggtggagtcttctgacaccatcgacaacgtcaaggccaagatccaagacaaagagggcattcccccagaccagcagcgtctcatcttcgccggcaagcagctggaggatggca

SEQ ID NO: 42230 - DNA, 481 bp, Oryza sativa
  Clone ID: uC-osroM202013e01b1
cgctgatctcgagccgctgctggagacctgcgccgcgctccgggagctcgacctgtcggagttctactgctggaccgaggacgtcgtgagggcgctcaccacgcacccttccgccaccgcggcgctcacccacctcgacctcggcctcgccgccgccaccgacggcttcaaatcctccgagcttgggccaatcgcggcctcctgccccaacctccgcaagctcgtggtgccatgcttgttcaacccacggttcagcgattgcgtcggcgacgacgcgctgctctcgctggccaccagctgcccgcggctgaccgtcttgcggctcagcgagccgttcgaggctgcggccaacatccagagggaggaggcggccatcaccgttgcggggctagtcgccttcttcgcggcgctccccgcgctggaggatttcaccatggatctccagcacaatgtgctggaggccgcgcccgcgatggaggcg

SEQ ID NO: 42231 - DNA, 571 bp, Oryza sativa
  Clone ID: uC-osroM202013e04b1
gtttatttatcaaggaaaaatctctcttcctatctccttcctccccacccacccccaaatccacctcgccgtcgccgccgcgaaaccctaggcagccatagccatggctgcggccatcctcctccgccgcgtcccccccgcgcgggcccaggccacggcgctcatcgcggcgcgctcgatctcggactccacggcgccgctcaccatcgagacctcggtccccttcacctcccacatcgtcgacccgccctcgcgcgacgtcaccaccaccccggccgagctcctcaccttcttccgcgacatgtccgtgatgcgccggatggagatcgccgcggattccctctataaggccaagctcatccgcgggttctgccacctctacgacggccaggaggccgtcgccgtcgggatggaggccgccatcacccgctccgattccatcatcaccgcgtaccgcgatcactgcacctacctcgcacgcggcggcgacctcgtctccgcgttcgcggagctcatgggccgccaggcttggtgctcccgcgggaagggcggatccatgcatttctacaag

SEQ ID NO: 42232 - DNA, 553 bp, Oryza sativa
  unsure (1)..(553): unsure at all n locations
  Clone ID: uC-osroM202013e05b1
gctgcttggacggggtactaagatcaccctctacctcaaggatgatcagctggaataccttgaggaacgtcgcctcaaggatctggtgaagaagcattctgagttcatcagctaccctatctccttatggactgagaagacaaccgagaaggagatttctgatgatgaagacgaggaagagaagaaggatgctgaggagggaaaggttgaggatgttgatgaggagaaggaagagaaagagaagaaaaagaagaagatcaaggaagtctctcatgagtggaacgtgatgaacaagcagaaacctatttggttgaggaagccagaggagatcaccaaggaagagtatgctgctttctacaagagcttgacaaacgactgggaggaacatctggctgtcaagcacttctctgtggagggtcagcttgaattcaaggccatnctgtttgtaccaaagagagcgccatttgacctctttgacaccaggaagaagcaaacaacatctagctgtacgtaccgccggttgttatcatggacaactgtgaggagttgatcc

SEQ ID NO: 42233 - DNA, 549 bp, Oryza sativa
  Clone ID: uC-osroM202013e06b1
gtttcttggacggggtactaagatcaccctctacctcaaggatgatcagctggaataccttgaggaacgtcgcctcaaggatctggtgaagaagcattctgagttcatcagctaccctatctccttatggactgagaagacaaccgagaaggagatttctgatgatgaagacgaggaagagaagaaggatgctgaggagggaaaggttgaggatgttgatgaggagaaggaagagaaagagaagaaaaagaagaagatcaaggaagtctctcatgagtggaacgtgatgaacaagcagaaacctatttggttgaggaagccagaggagatcaccaaggaagagtatgctgctttctacaagagcttgacaaacgactgggaggaacatctggctgtcaagcacttctctgtggagggtcagcttgaattcaaggccattctgtttgtaccaaagagagcgccatttgacctctttgacaccaggaagaagcaaaacaacatcaagctgtacgtacgccgggtgtttatcatggacaactgtgaggagtt

SEQ ID NO: 42234 - DNA, 161 bp, Oryza sativa
  Clone ID: uC-osroM202013e07b1
gtctctcgttcgcgcaaagcacgctgcttttctccgctttgcgagcaccatagcctagcccaccatgtgcggcggcgccatcctctccgacctcatcccgccgccgcggcgggtcaccgccggcgacctctggctggagaagaccaagaagcagcagcagc

SEQ ID NO: 42235 - DNA, 510 bp, Oryza sativa
  Clone ID: uC-osroM202013e09b1
ttgtgggtgggcttagtgcatggctattccctctctgccttagctagatcaagctagctccttttcattcttggagaaggatcgattaggaagataagttcttcgcaaatatagatagcttcttttcttaattttctccttctcagttctcgtttttttcttcttgatcgaaaccgatcgatcatatatatagttagctagcatccttgttgtttttaatcccaaggatctagttaattaattacttcttgcaaatttcatgcaaaaactgatacacagacacaagttcgatataatttaatttcgagctttgatcatatcgtccccttgatcttttccttctctctttggaaatcccatcaaggctccatatttccttttgtggaaaaacgccttagatcgacgatctgagcgagaaattcgaattacttttcgtctcctcctagagatcatcatggaccacgttcttctggatcgccgggctttccggagcttcgagtccccaggaga

SEQ ID NO: 42236 - DNA, 404 bp, Oryza sativa
  Clone ID: uC-osroM202013e12b1
caccaccaccaccaccaccaccgtctccagccatggcctcctccgcctccctgcagcgcttcctccccccgtacccccacgcggcagcatcccgctgccgccctcccggcgtccgcgcccgccccgtgcagtcgtcgacggtgtccgcaccgtcctcctcgactccggcggcggacgaggccgtgtcggcggagcggctggagccgcgggtggagcagcgggagggccggtactgggtgctcaaggagaagtaccggacggggctgaacccgcaggagaaggtgaagctggggaaggagcccatgtcattgttcatggagggcggcatcaaggagctcgccaagatgcccatggaggagatcgaggccgacaagctctccaaggaggacatcgacgtgcggctc

SEQ ID NO: 42237 - DNA, 303 bp, Oryza sativa
  Clone ID: uC-osroM202013f01b1
caagtctagagagagagagagagagagagttgctggattggacgccattgatgctgtagcagagaggtgccaaggtccaagaaagtgagagagagagagattgattgaatgaacatggaggctgcaagaagagtatgaagaggaaggcaaggtggtggtttgctgctggaggttcttgccgctcatctgttttttctccttgcattggcgcgcggcgcgagcgcttgggcccacggcgggcttgtcggcggcgccggctttttttctaaaaaagccgaaagttcatggatcttgatataagga

SEQ ID NO: 42238 - DNA, 442 bp, Oryza sativa
  Clone ID: uC-osroM202013f02b1
gctgttgggagcacgccgctgtgcaaggcgcacggcggcgggaagcggtgcatgttcgagggcggcgggctctgccccaagagcgtccacggcggcaccagcttctgcgtggcgcacggcggcgggaagcggtgcacggtgcccgggtgcggcaagagcgcccgcggccgcacggactgctgcgtcaagcacggcggcggcaagcggtgcagggtcgacggctgcgccaagagcgcgcaggggagcacggagttctgcaaggcccacggcggcggcaagcgctgcacctgggccaccggctgcgagaagttcgcccgcgggcggagcggcctctgcgccgcgcacggcacgctcatggcctcacagcagcgtcgcgccggcggcggcgggagcatgatcggtccagggctcttccacggcctcgtcggcgccatgaacaacg

SEQ ID NO: 42239 - DNA, 495 bp, Oryza sativa
  Clone ID: uC-osroM202013f03b1
cgaaatgaaaattctgtccacccaggacactgtcttctctctctctctctctctctctctctgcttcgagttcgtcgattcggttcaaatcactcgtctcgtagtcatagatagatggctcgtctcctcaatccaatcttgccgctctccgggctcacagtttcttgatttccccattcttttttcgtttccaaagtttttttcttcttttttgttgatctttgtgttgatttcttcctctgcgagtccactcccagtccagggtcagaagcttgctgttgaattccacactgttgaagcacaactcgagtttttctcatcaaatttcatcttttcttctgttcttttccctctctctctttttgttttggcttaaatcttactagagttcatcacagcttcccacactcgttttcccgtctcgatttcatcagctgaggtcggcacttgctcatctttgccgatttgtttcttctcgagagcctacaaaaattc

SEQ ID NO: 42240 - DNA, 515 bp, Oryza sativa
  Clone ID: uC-osroM202013f04b1
actagtaaagggaggagcaggtacacgggggttgagatctgaggagggaggagaggaggttcgtgatgatggagagccaggcgctgcaggaccccgtcgccgagccccatggagctgagcctgccgccgccggagctcctcccgccgtggttcccggcaaggagttcacccgcacctgcaagggcctcgtcgtcgtcctcgtcggcggatatgtgctgctccagctcctcccctactccctcgactacctcgccattatccccgccaagactattccatttgtatggactgtcttcacagctggctacatcgaacaagttcttccaggggctatcggcagttcccttggtcttctcttctgtgggaaggatatcgaaccagtgtggggccgccaagaattcttgaagtttatcatcttggtcaactccatctgcggtgtccctgcattctgctttgctgttgcactctactatgtcactggaaaggaaagcttccttgttacaccactttctggt

SEQ ID NO: 42241 - DNA, 438 bp, Oryza sativa
  Clone ID: uC-osroM202013f08b1
tcattctttgtacaagatggctatggctgtcgaccattgaccattgctgaggagcacaaggattgcaacacatctctttcttgtcatggtagttcacagtggggcttgacaacaagaggtggcaacttgtgcactgagagatgctgacgacgctacccacatcgcttcacctgtatagaagacaaaatggagcttatagtggtacgatgtcaatacttcaggattggctggcgccgtgaagtctaaggtgcagccgctatcgcctgccttcatggtaccacgaaaacgcttgcagattggctttgtataggggtatagatggggggtggccagccctttcagaactctcgcacatggccattatatttatctgaacattatgtatgctttctttatagtttttgatatttaagttcacagaaatgatgtttggtgatc

SEQ ID NO: 42242 - DNA, 470 bp, Oryza sativa
  Clone ID: uC-osroM202013f10b1
ctaagtaagtgaatgcttagctagcttcgcataaatccagctctctcttgctaatggcgggcgtcgaggtctccaagccgtcgaggcgcctgtcgccgaaggggagcttcaagctgagcctgcccagcctgctggcgtgcgggcagtgcaaggccacggccgtctcgccgccggagtcccccacgggcgtcggcgcgaggtcgttctcctcgtcggcgtcgtcgtcggcggtgacgtcccgggggagggagcgcgaccgcctggcggagctccgggagatcttcggccactttgaccgcgacatggacgggcggatctccggcgacgagctccgcgagttcttcgcgtccatgggcgacgactccggcgccgtcgccgccgtcgacgctgtgatggggctcgactgctcggcagtccgcagcttagagcggcggttgagttgctgcctgttgcttgcgtttgaggacttc

SEQ ID NO: 42243 - DNA, 285 bp, Oryza sativa
  unsure (1)..(285): unsure at all n locations
  Clone ID: uC-osroM202013f12b1
tgttaacggtggctgttggcgtcatcaagaacgtggagaagaaggacccaaccggtgccaaggtgaccaaggctgccgccaagaagaaatgagcatcgttgaagtggtggttatgctggctgcatttgagatatcttagcgttcgttaagttttgcccacggccatggcactcgttgcatggaccgttaatatctgctcgcaatgtgcactatgttagtcgtttaaaactcgtttatttctattcggttnaaaaaaaaaaaaaaaaaaaaaataaaaaatattag

SEQ ID NO: 42244 - DNA, 395 bp, Oryza sativa
  Clone ID: uC-osroM202013g01b1
ccctcgttgggttggattggtcaaggcggcaacgaaccgaaggaaggaagggaagcatctgggctacaggtccacgcgatcgattgttcgatcgatctcggattgatcgctttgtgattgtgattaatctcgcggcgacatggcgacgtcgtgggctgcgccgccgccggggtacccgtacgcgcagggtcagggcggcgcccagccgccgcacccgccgcagtccacggccgtcgccgtcactccggtcagcaacggcgtggggaacccctacgtgatcgtcaccccggccagcgcgtccccctccacctgccagtcactaaagaaggcgctggatcggtacggcaggaagcttgaagacggcacccgcaaggcccgcgacaccaccggcaaca

SEQ ID NO: 42245 - DNA, 398 bp, Oryza sativa
  Clone ID: uC-osroM202013g02b1
catcaatttcgacgagaagatgaagctcgggcagggcggctacggcgtggtctaccgcgccaccgtcgttggggagaacggccagaacatggaggtcgccgtgaagcagttctccggtgccaacaccaaggggcaggaggatttcctcgccgagctcagcatcatcaaccgcctccggcaccgtaatctcgtcaagctcgtcggttggtgccaccaaaatggcgtcttgttgctggtgtacgactacatgccgaacggtagcctggacacgcacctcttcggcgggccggagtcggaggtgctgaactggcagcagcgctacaacgtcgtcaccggcgttgcgtcggcgctgaactaccttcaccacgagtacgaccagatggtgatccaccgcgaca

SEQ ID NO: 42246 - DNA, 480 bp, Oryza sativa
  Clone ID: uC-osroM202013g05b1
cttattcgttgctcatagaacacatcaccgcgacaaaaaataagcctctcttgttgtcacctccacacgtccatttgtcaccgctgatgagctttcgtgtgcgccagctgcacaaagaaagaccggtccataagagcggctgcctggttctgaatttctagtcgccacagcggagaggagccgatacttccatggccatgaagaagcttgtgctgaagctggacctgcacgatgacaaggataagcagaaggcgatcaaagccgtctccaccctccacgggatcgacatgatctccatggacatgaagggccaaaagctgacggtggtcggcgacgtcgacccggtggacgtcgtcggcaagctccggaagggctggccgtcggcgagcctcctctccgtggggccggcgaaggaggagaagaaggaggagaagaagccggaagagaagaaggacgacaagaagccagagcaacccaagc

SEQ ID NO: 42247 - DNA, 605 bp, Oryza sativa
  unsure (1)..(605): unsure at all n locations
  Clone ID: uC-osroM202013g06b1
ggctttgagttctcttgtcaccactctgcaagagaaaaaggatccagatcatcctgctgaaaaagatcattctgatgcattgtcccagatttctgaaattaacactgcattggatgcattatggttggagctgagtaattgcataagcaaaatagagagctcttcagaatacgcatcgaatctaagtcctgcttctgcaaatgcagccacattaacaacaggtgtagcacctccattgcctgccggaactcagaacatattaccgtacatagaatcattttttgtgacatgtgagaagttacgccctgggcaacctgatgctattcaagaagcttcaacatctgacatggaggatgcatcaacttctagtggtgggcagaaatcatctggaagccatgcaaatcttgatgagaagcacaatgcgtttgttaaattctcagagaaacacagaagattgttgaacgcatttatncgccaaaaccctgggctattggagaagtcattctctctgatgttgaaaatccctcgcttgattgaaattgacaccgcgtgcatatttccgtctaaaataacatcacatgatcatcatatagcctgtagaattc

SEQ ID NO: 42248 - DNA, 423 bp, Oryza sativa
  Clone ID: uC-osroM202013g07b1
gttattttgtatccattgttgcgccactttgggtatggtttggacttgaaagaagccacaattcttgtttgggcgggactgcgaggggctgttgctctgtctctatcattatctgttaagcgtgctagtgatgcagttcagacccatctgaaaccagttgacggaacaatgtttgtgttcttcactggtggcatcgtgtttttgacattgatttttaatggttctactacacaatttttgttgcatctacttggaatggacagattagcagcaacaaagcttcgcatattgaattatacaaaatatgaaatgctaaacaaggcattggaggcttttggtgatcttagggatgatgaggaacttggtcctcctgctgattgggttactggaaagaaatatatcacatgcttgaacgacttggac

SEQ ID NO: 42249 - DNA, 562 bp, Oryza sativa
  unsure (1)..(562): unsure at all n locations
  Clone ID: uC-osroM202013g11b1
atccagtaatcgagctccagacatccatcaatggccatggagctctctaacctgacgaggtgccatctgccactgctcctgctcttcctgctggcaggatcctcctccatggctttgccagtgcatcctgcaatggacagggtgagatggcaggtcgacaaggtcaaccggcggggccattccatcgggctcgtcatgtcgtacatcgatgaggccactgctcttgaatcctccggctacttcagaccttggcatgtcctccccttcgttgacctctacggacgaaggtatcacatcgggagtattagaggtgtcaatgttatatatgcactgacaggacaacgcaagttaaatgcggctgtgactgtacagactctcatcgacgtctttactgtgtctggcattgttcattatggcacagcaggaagctctaatgattcaatgtcatttggcgatgtcagtgtccccaaatttgttgcttatacaagtgctnggacatggaagaagtcaaatcaccaaaagagtcggatacagaactagctttgagatttactgtcccaat

SEQ ID NO: 42250 - DNA, 518 bp, Oryza sativa
  Clone ID: uC-osroM202013g12b1
gagttggggagattgttttggaaaggaacatttggcaaggtgcactatgcaaggaatctggagtcaaaccagagtgtggccataaagatgatggacaaacagcagatattgaaggtcgggctttcggagcagatcagacgtgagatcacaaccatgcggttggtggctcataagaacattgttcagcttcatgaggtcatggcaacacggaacaagatctactttgtgatggagtatgtgaaaggtggtgagctatttgaaaaggttgcaaagcgtggaaagcttacagaggttgttgcacataagtatttccagcaactcattagtgcagtggattactgccacagtcgaggtgtgtatcaccgggacttgaagcctgagaacctactgttggatgagaatgagaacctgaaagtctcagactttggattgagtgcgctttcagagtcgaagaggcaagatggcttactccataccacctgtggaacacctgcatatgtagctccagaggtgattag

SEQ ID NO: 42251 - DNA, 290 bp, Oryza sativa
  Clone ID: uC-osroM202013h01b1
catcaacttggacgagaagatgaagctcgggcagggcggctacggcgtggtctaccgcgccaccgtcgttggggagaacggccagaacatggaggtcgccgtgaagcagttctacggtgccaacaccaaggggcaggaggatttcctcgccgagctcagcatgatcaaccgcctccggcaccgtaatctcgtcaagctcgtctgttggtgccaccaaaatggcgtattgttgctggtgtacgactacatgccgaacggtagcctggacacgcacctcttttgcggtccgg

SEQ ID NO: 42252 - DNA, 294 bp, Oryza sativa
  Clone ID: uC-osroM202013h02b1
gcttctttagtagcacgacggcgagctcgcacacgcatcccgacgccgccgcgaggccgcggccgccgccggcgacgatggatctcccgccgctctcccaccaggcgctcttcgccgccgtccgatccgcggacgccgccgccgtcgccggcctcctggccgacgccggggcgttcgggcccaccacccaggcgctcgccgtcgcgcagacggacgccggggagacggcgctgtacgtcgcggcggaggccggctccgaggagatcgtacgccttctcataccgctctacgacc

SEQ ID NO: 42253 - DNA, 468 bp, Oryza sativa
  Clone ID: uC-osroM202013h04b1
gctccttcaagagcaccgtgctcaaggagattctccaggagccactgtggtccaaggacgaggcgaatgcggtggtggttgaggcggatgcgttcaaggagacggacgtgatctaccgtgccattagctccatgggccaccacaacgacatgctccagactgctgagctggtgcaccagtcgtcgacggacgcggcgtcgtcgctgctggtgacggcgctgaacgagggtcgagacgtcatcctcgacggtaccctctcctgggagccgttcgtccagcagaccatcgccatggcgcgcgacgtccaccgccgccgctaccgcatgggccccggctacaaggtcgaccccgacaccggcgacatcaccgagaactactgggagcccgacgacgccgacgccgacttgtcgtcgtcgaccaggaagccttaccggatcgaggtcgccggcgtggtctgcgacgcgtacc

SEQ ID NO: 42254 - DNA, 400 bp, Oryza sativa
  Clone ID: uC-osroM202013h05b1
gccgccgacgccgccgcatcgcgcctcctagtccgccgcgcgccgccgggcctgctgcgccggttaccccgcgcggcgctcgccgtctctcgcccgtcgccgccgtcgacgtcgtcgtacggtgcagaagccgtcgccctctgccggcagacgctcggccaccgcgctaggatgggacacaccgacgacgccgacgccgccgggggccccgcgctcgggctcaccaagcccaacgccgtcgagccgacgcaggtgcgtgttcgggatggggttcgggttcaatatcaggattcatttgctgctaaagacgtcgaattctgcgaatggaagggagacatcctcgcaatcgcagtgacagaaaatgatctgggcaaaggatcagacttcaaattcgagaatg

SEQ ID NO: 42255 - DNA, 328 bp, Oryza sativa
  Clone ID: uC-osroM202013h08b1
tgcttcgctcactagcgcacagatctcctaccaccaccaccaccgccgcagccatggcgaccgggtactaccgcggcggcggcggcgccagggaccacgccgacgagcccgacgacttcgacgagtacgaccccacgccgtacggcggcggctacgacctcttcatcaccttcggccgcccgctcccgccctccgacgagacctgctacccttgctccgctccctccacctcctacgacgccccgcactactccgccgacgagccctccccctacgcccaccactccaagccgcagcccgcctacggcttccgcccccagcacgagca

SEQ ID NO: 42256 - DNA, 438 bp, Oryza sativa
  Clone ID: uC-osroM202013h10b1
ttcttgctcgagctggttcagagcagcttcaggctcgggcatggcgtcggtgggcttcactggagtggtggcgatgctgctcatggccacagcgttcttgggggtcactgccgacactagctcagacgacgtgactgccctaaacacgttctacacaagtctgaactcgccctcgcagctgacaaactgggtggcgcagaacggcgacccttgtggccagtcttggcttgggatcacttgctctggatcaagggtgataacaataaaattacccggtatggggctcaaggggaccttggggtacaacatgaacgtcatgactgcactggttgagcttgatgctagcaataacaatcttggaggaggtgatatcccttataatctccctccaaatcttgagaggctaaatcttgagaacaatagcttcactgggacttt

SEQ ID NO: 42257 - DNA, 512 bp, Oryza sativa
  Clone ID: uC-osroM202013h11b1
tcctaatcttgctgagcatgagaaaccactggaatgcacacaattaccaggagagaccatatttgttcctagtgggtggtggcattgtgttttgaaccttgacatgacaattgctgtcacgcaaaattttgtcaaccaatcaaattttaagcatgtatgtttggacatggcacctggttactgtcacaaaggagtttgccgtgctggcttacttgctgctccagacaaatctattagagatattgaaaatcttcctagtataacgagtagattgaaccactctgacatggcctgtaaggaaaaaagactgaaaagttcagagcctataagaacttcaaataatgcaaatcagtgttctgcatttgagttctcagatgttcatgaaaacttgggggaccaagttttttcgtatgatatagatttcttatcccaattccttgagaaagaaaaggatcactattcttctgtctggagccctactaattcaatttgccagagagaaacaagagaat

SEQ ID NO: 42258 - DNA, 467 bp, Oryza sativa
  Clone ID: uC-osroM202013h12b1
tcgctccccgccggatcgagcagctagggtttcgacctttttttttcccaccaggagggcgacgagatgttcgggcgcgcgccgaagaagagcgacaacacgcggtactacgaggtgcttggggtgcccaaggatgcgtcccaggatgacctcaagaaggcgtaccgcaaggccgccatcaagaaccaccccgacaagggcggagaccccgagaagttcaaggaattggctcaggcttatgaagtcctgagtgaccctgagaagcgtgaaatctatgatcagtacggtgaagatgctctcaaggaggggatgggtcctggtggtgggatgcatgacccatttgacattttttcctcattctttggaggtggctatggaggtggtagcagtaggggcaggagacagcgtaagggagaagatgtggttcaccctctgaggttattcagaggaattgtacatggcacatg

SEQ ID NO: 42259 - DNA, 456 bp, Oryza sativa
  Clone ID: uC-osroM202014a01b1
gcgcttttatgcctcccagacgctctggctctccgggcgactgctccgccgccggcgtcgcgaccgccgacggagctcctagctgctgcctctactgggttggcggggagtggatcggggatctggacgcaggggccgattccttctctcagttaggaggacataacacagaataggtgaagatgagcagcatacgcacaggatacgatctgggcggtaccaccttctgtccggaaggtcgcgtcttccacgttgagtatgccaccaaggctgtcgacaacagcgggactgccgttggaatcaagtgccaagatggaatcgacctgggtgtggagaagctagccacttctaagatgacgctggcgggatctaatacgaggatccattcaatggactggcactccggcttggctggtgcttgtttacctgcacatggcaggcaaaattgcttaagag

SEQ ID NO: 42260 - DNA, 218 bp, Oryza sativa
  Clone ID: uC-osroM202014a04b1
ttctttctccgactcctcctcctcgcgcggcggcggcggcggcgtgagccagcagcagccatggtgctgttctcggtgacgaagaaggccaccacgcccttcgacggccagaagcccggcacctccggcctccgcaagaaggttactgtattccagcagcctcattaccttcagaactttgtgcaatccacatttaatgcccttcctgccgacaaagt

SEQ ID NO: 42261 - DNA, 208 bp, Oryza sativa
  Clone ID: uC-osroM202014a05b1
tcttattcaaatcaagcgttggtgagaggaagaaggtaagctaagcaaagcacgcaaagctcgagagaatgtgacagcagctttggccatgggcgagcttgcgctgctggacttctgggcgagcccgtacaggcagcgttgcctgatcgctctggcggagaagaagcttccctatgactactccgagcaggatctactcatcgccaag

SEQ ID NO: 42262 - DNA, 411 bp, Oryza sativa
  unsure (1)..(411): unsure at all n locations
  Clone ID: uC-osroM202014a06b1
gttcattcaaatcaagcgttggagagaggaagaaggtaagctaagcaaagcacgcaaagctagagagaaagtgacagcagcaatggcagggggcgagcttgcgctgctggacttctgggcgagcccgttcgggcagcggtgccgcatcgcgctggcggagaagaagctcccctacgactactccgagcaggagctcctcggcgccaagagcgacctgcttctgcgctacaaccccatacacgccaaggtccccgtccttcttcacagggacagagacacggccgcaccttctgcgagtccctcaccatcctagagtacctagacgacgcctttcaggacgccacctgtgcttctacccttcgncgncgacgacccgtacgcgcgcgcccgggccaggttctgggccgacta

SEQ ID NO: 42263 - DNA, 481 bp, Oryza sativa
  Clone ID: uC-osroM202014a07b1
ttcgcacgccccagagacgaaaggcgccggcgatggtgggctgccgcagggcgcgcgccggggaggagaccggggagctggcggcttaggccgggcggcgcggcaggaggcagcacccctgccgggccagcgcatccaagcgcgcagctggggtgacggcgcggcacggcggccaggcgggtgcgcggccgggaggcgatgcagagaggtggcgttggcggaggagggagatgagggagctgcaccaggtaggaggtggtcgggcgccggtggcgaagggaggaaaccggcggcgacggcggccgatgcgacggcgacgccgatgggcgtgaggaggccgcggctgggggcgctcgtcccggtgcagggacgcggccacgcaaaagggccggaggtggcgcctgtgcgggccgatctggtcgcgcgcgggcggcgttccacccggagcggcggcgaccccgatcaaggcgatgagggtggc

SEQ ID NO: 42264 - DNA, 465 bp, Oryza sativa
  Clone ID: uC-osroM202014a08b1
tttttagaccgcaagcgggcaaggttcctttgttggtttagggtccaatgccaacgctatttacttgaacctttctcaattgtcacgaactgtacaaaagttgcaaaagtggtgggacctatggtgttgcatatcacaccagaatagggaatcacaggctatgatccagatatctagcagaagttgggtcatgcgttaagctaacgataatggcatttttatcgatggatggagagcacattaatgcgccagccataacatgttatggcttcagcaccaagaacatgacattaactacctcgaaggttgatgtaaacaatatggacataagggccataaatacaaaatcgacctttcatgattcaggacgatgtgagcatggaaggctaagctaagctgcaggcctatgaacttccacttctgccgctgcattttgtgccatgagaattgtgcacactcttttag

SEQ ID NO: 42265 - DNA, 530 bp, Oryza sativa
  Clone ID: uC-osroM202014a09b1
tttaccctctcgccgtcgcagatccgatccaggaagagctcgccgccgccgctgccatggcgctctccgtggagaagacctcgtcggggagggagtacaaggtgaaggacctctcccaggcggacttcggccgcctcgagatcgagctcgccgaggtcgagatgccggggctcatggcgtgccgcgccgagttcggcccctcccagccgttcaagggcgcccggatctccgggtccctccacatgaccatccagaccgccgtcctcatcgagaccctcaccgcccttggcgccgaggtccgctggtgctcctgcaacatcttctccacgcaggaccacgccgccgccgccatcgccagggactccgccgccgtgttcgcctggaagggggagaccctcgaggagtactggtggtgcaccgagcgctgcctcgactggggcgtcggcggcggccccgacctcatcgtcgacgacggcggcgacgccacgctgctcatccacgagggcgtcaaggccgaggaggagttcgag

SEQ ID NO: 42266 - DNA, 301 bp, Oryza sativa
  Clone ID: uC-osroM202014a11b1
ttttactggtcctaggagtgctttgttcgtacctgaggtaccttttgaggtccttgtacgcaggcagatcagcagattgcttgatccaagccttcagtgtgcaggtttcatatacgatgagctagtcaagatgagccatcgctgtcttgctgttgagctgcagcagcttcctctgctccgtatgagcatggatgaagtcatcgggaggtttttacgggatgggcttaagcctgcgccagatatgatagcacatatcattgagatggaagcggattacataaacacctcttatccaaatttc

SEQ ID NO: 42267 - DNA, 152 bp, Oryza sativa
  Clone ID: uC-osroM202014a12b1
gtatctggggctaggcgcgctttgggcagccgggtggtaccttccgtggtcgggggtcgccagcagctcaggagattgctcgatccaagcctgcagcctgcaggtctcatatgcaatgagctagtcaagatgatccatcgctgtcttgctgt

SEQ ID NO: 42268 - DNA, 484 bp, Oryza sativa
  Clone ID: uC-osroM202014b04b1
ttttctcccaatttaacagagagaggctctccactttggacctttttggagatggagctccatcaccatggaaccagcagcgtctgaggtggctttcaggctcctgatcaccgatcaccgccagacttgccctccatcacattcgagatcttagagcatagcaatcagatgggttcaatctgatggtttttccccattctccagctgatggatgtacacaagaaacttctcctggcctccctcagctgtgtacttctgatccaagtagcatcgagtgatggcactgcagagggagttggaacaacaagctggacatgtgtatgcacagctcatccactaggtgaaccaaactcaaatagcagcttgtcgtcgaattgttcttcttcctgccattgtctacaagatgatgatggtggcacaggatcatggaactgcacatgtgcttctgacaaagcccttataatagacacactgcagtacatga

SEQ ID NO: 42269 - DNA, 242 bp, Oryza sativa
  Clone ID: uC-osroM202014b06b1
tttttctctctcctctctctctctactcttctcttctctctccttttgttgcttccatttctcgttcttgcacggggaagaggagagaaagatgcgtgtcgctgcggtttgaaaaaggttgggtgtgagaggagagagaaagtggactggaggggagagagagagagagagatgggttcttgcgcttcggttcacaaggacctcgggttccccaagaagctgtttcttgcgttgtcgcctac

SEQ ID NO: 42270 - DNA, 511 bp, Oryza sativa
  Clone ID: uC-osroM202014b07b1
gtcctgttctcttggttttctcatgttgattgcagatcctatatgaaagaatactgtcagctaagactaactcctcctcagctgaaaagaaatggaaagcttctaaggatacgaacttgccagaccaatattcaaagtttatgagtgcactgtataacttgcttgatggttcttctgacaacaccaaatttgaagatgactgccgttcaatcatcgggactcagtcatatgttctttttactctagataagctgatatacaaagttgtaaagcagcttcaagcgatagcttctgacgaaatggataacaagctgctccaactttacatatacgaaaaatccaggtcacctgggagattctttgatctagtttatcatgaaaatgcgcgtgtacttctccatgatgagagcatatatcgatttgaacggcgttcaaatcctacaagattatcaattcagctaatggagtatgggcatgaaaaacctgaagttactgcagtgtcaattgatcc

SEQ ID NO: 42271 - DNA, 394 bp, Oryza sativa
  Clone ID: uC-osroM202014b09b1
tgtgttctctctcctatctctctctactctggtgttgtctctcctcttgatgcttccattcctcgatcttgcacggggaagaggagagtaagatgtgtgtcgctgaggattgaaaaatcctgtgtgtgagaggagatacaatgtcgcatgggggggaatgacacagagtgagataggttcttgcgctccggctcacaaggacctttagttgcccaagaagctgtttcttgcagatacgcctaccacggcaaagatggcctcgaacggcaccggtggcggtggcagggtactctgttgatctcacgcccaaggcgcagcatccggcggtgtgcgcaagggttgcctttatgagccccctctctgggaacaaggatcacatgctctctaactcgcg

SEQ ID NO: 42272 - DNA, 505 bp, Oryza sativa
  Clone ID: uC-osroM202014b10b1
tctcctttctgaatctttgatatttttctatgtggaacatggatgccaagtttcacatcttcaacagatttgtctattcgctttgcaaccacagaatcctcttcgtacgatagccacagcttctctgatgaacccggtaatgtctcccactaaatacaacttctggaggacatccctgaagatgcacacgatccaacagatatcggcacctggattcagagggcagacttgcagatgctccaactgtttgggaaagaattggtggcattgattgatcgaagcattcaagaaatcaaccgcgagcacggccaagctcgaggagcatctgaaatgcgtcgcctgctgaagctagctgtcgtgattaccatgctgccaacctcgcctgatctgttgcctgtcatactgcgtctgtacgcgacgctcgggactttcccgatcgaccagctaaacggcatcaccaaagagctcatgaagtgtgtcaggaagatcttgcgacgggtatgtt

SEQ ID NO: 42273 - DNA, 178 bp, Oryza sativa
  Clone ID: uC-osroM202014b12b1
tttatgtttctctcgtcaatccgtccataaatccaaggagttgagaactttgagatcccttccaaccggttgccaaggacctgtaggttgtaactatttcctccggaatttgggaggggtttggtttacctgtgcaagaagaggaagatgaagaagaggaggaggatgcaagacgttc

SEQ ID NO: 42274 - DNA, 450 bp, Oryza sativa
  Clone ID: uC-osroM202014c02b1
ttgattgagcttgttttgtttccccatgcacattcctccctccatttccaccaccaccccaaatcttgttgggtgatctatctatctatcatcttcttgtaggagtactagtggagtttgttgatcttcacccccaccaccattaatggctgcaaagcttcactagaggaggaggactagtagtataccatcttcttcttcttctagcttgatctggtgctccattggtggtgttggtgcatcttgatctgggattctggggagaggttgagtgaatctttgggcctccatggggacggcggcggtggcggcggcggagaggccgaagcagcggcggagcatccacctgtggaagaaggcgctgctccacttctccctctgcttcgtcatgggcttcttcaccggcttcgcgccctcgtcgtcgtcttcttggcggaccgggagcggtgg

SEQ ID NO: 42275 - DNA, 420 bp, Oryza sativa
  Clone ID: uC-osroM202014c03b1
acgcgcgtttgtttctacatgaaaagctatagccatggcggaggacaaggagctggtgctgctcgatttctgggtgagcccgttcgggcagcggggccggatcgccatggcggagaaggggctggagttcgagtaccgcgaggaggacctcggcaactataaagacctccttgtgcattctaacacctgccacaggaagaatgccattctcctcaacggcggtcgtccagtctcctagtgcgtgctgatactccagtgcctcgacgacgcgcatgcgggtaccctgcacgtgctgccttcagcgaactccggctacgccgacgccctgtacgcgcgcgccacggggaggttctgggcggactacgttgacaggaaggtctacctctgtgggtccaagctgtggaggctcaagggtgagcc

SEQ ID NO: 42276 - DNA, 459 bp, Oryza sativa
  Clone ID: uC-osroM202014c06b1
ttgttctctagttgaaaagctatagccatggcggaggatatggagctggtgctgctcgatttctgggtgagcccgttcgggcagcggtgccggatcgccatggcggataaggggctggagttcgagtaccgcgaggaggacctcggcaacaagagcgacctcctcctgcgctccaaccccgtccacaggaagatccccgtcctcctccacgccggccgtcccgtctccgagtccctcgtcatcctccagtacctcgacgacgcgttccccggcaccccccacctactccctgcggcgaactccggcgacgccgacgccgcgtacgcgcgcgccacggcgaggttctgggcggactacgttgacaggaagctctacgactgcgggctcaggctgtggaggctcaagggtgaagcccaagcggcggcagggcgcgagatggcggatatcctccgcacgctg

SEQ ID NO: 42277 - DNA, 462 bp, Oryza sativa
  Clone ID: uC-osroM202014c08b1
ttctcttcttcagttcttcctaaggtggttgatgatgccggcgagggcgaggccaaccctcgccgggcgaaatggtggtacgcgacgttccacagcgtcaccgccatggtcggcgccggcgtgctcagcttgccgtacgccatggctcacctaggatgggggccggggacggcggcgctggtggtgtcgtgggggatgacgctgtacacgctgcggctgctgatcgagctgcacgagtgcgtgcccggggtgcggttcgaccggtaccgcgacctctgcgcgcacgcgctgggcccgcgcctggggccctggctcgtcgtgccgcagcagctcatcgtgcagctcggctgcgacgtggtgtacatggtcatcggcgggaaatgcctcatgaagttcgccgagtcggtgtcgtcgtggtcgcgcgcgccgcatctgcaccaccagtcctactggatctgcatc

SEQ ID NO: 42278 - DNA, 469 bp, Oryza sativa
  Clone ID: uC-osroM202014c09b1
tttgcgtgcaccacctacctccgctgcaaggtctaccacccggggatggaggcggagtgggacctccacgccgtgcccatcgcccgcggcggcgcgccgatcgccgacgccgccgccggctcagctctccggcctggaggcagtggaattctgaacagctcgatggggatgctatcacctgcacttcggcctatgccagtgacaccaacggcgctccggtggccgcctccggggagcgaccagtctccggcagcaaaggcggccatgtgcttgctttgcaagggtagctatgagcgcgagctcgctaagcttgaggccgaacagacggataagccggcgtcccgccctgaggctgccaagcctggattgccacactggctgcagctcagcaatgatcaaaataaggccaaggagcaagagccgaaacttaagaagagcatagatgaacttgagaggaaatggcgcgaga

SEQ ID NO: 42279 - DNA, 412 bp, Oryza sativa
  Clone ID: uC-osroM202014c11b1
gacctggtaacattccgtctttgtattatggggcgactccgccctgatcggatcactggggagcccatggatgatggttttggggcaattgtgatgaactgcaagaagctcactagactttcagtctctggtctgctcactgataaggcgtttgcatacattggaaaatatgggaaactaataaagacactgtctgttgccttcgctggaaatagtgacatgtctctccaatctgtgtttgaaggatgcactaggttgcaaaagcttgaggtcagagatagtccttttagtgataaaggattgctctctggcctgagctatttttacaacatgaggttcttatggatgaattcatgcaggctaaccatgaggggttgtagagatgtagctcagcaaatgcctgacttggtgg

SEQ ID NO: 42280 - DNA, 506 bp, Oryza sativa
  Clone ID: uC-osroM202014c12b1
gtctgggcaagaaacttgattggttttgtggattcgctctgagagattcaagaatcgaaggaaagcaagtttgatgatgataagcatagcagggtgaaggagcttgttaagaatatgcaaacagtattatctcacgaaatagggcctgtttctttaaatgcacaagagaatgtatcccttccagatgatcttgtcctgaatgaaaatcttgccgagcttgttgacatcatcagtgaagatgacactactctgtcatcttcaattgctttctaccctcgtagctgcggctcagtcgaaaccagagatgaacctgcattatcacttggactatcttctgttctttctgagcaccgtaaaaggcacggactgtactatcttccaacaggaaaagcggaggatgggccagttgattatcctcatgccaatgatcctctgctgtctgctagcagcgaaagtgctccggatgataaattgaagactatccatcctgttaccggtgggaaaaa

SEQ ID NO: 42281 - DNA, 497 bp, Oryza sativa
  Clone ID: uC-osroM202014d02b1
cgtgctatcctccttcctccatgattcccttctcgaatcttctcactttcttctgaagtgctccgctccgctccgctccgatccaatccactccgcccgagtcccccacccatcggcacccaccagcgcgagggtgggtggccatcgatcgatcggcccatcgccgattcccgcgggatctgcggcggagcggggggatttgatcggagggtgaatatgtcgacgccagcaaggaagaggctgatgagggatttcaaacgactgatgcaggatcctccagctggcataagtggggccccacaggacaacaatataatgctttggaatgctgtaattattggccctgatgatactccctgggatggaggtacgttcaagctgacacttcagtttactgaagattatcctaacaagccacctacagtgcgatccgtttctcggatgtctcatcctaacacttatgctgatgggagcctatgcctagatatactacaaaa

SEQ ID NO: 42282 - DNA, 351 bp, Oryza sativa
  Clone ID: uC-osroM202014d03b1
gccccttgtctgtgacattgttaccggaatggtcaaggctgggtttgctggagatgatgctccccgtgctgttttcccgagtattgttggccgtccgcgacatacaggcgttatggatgggatgggacaaaaagatgcttatgtcggtgatgaggcccaatccaagaggggtatcctaaccttgaaataccccattgagcatggaattgtaagcaactgggatgacatggagaaaatttggcaccacacattctacaatgagcttcgcgtagcaccagaagagcatccaattctttttacggaggcttcacttaaccctaaggcccacagggagaagatgacacaaattat

SEQ ID NO: 42283 - DNA, 519 bp, Oryza sativa
  Clone ID: uC-osroM202014d04b1
tgttctgcaatgctcaagagtcgttttgctggtacaattgtcaaggcgcagcagaaagcacttctggatcatgggaagaaaatagaccctgcgaaattgcagttagaaaaggagaggctggaaaaaaggcagcaagaagagaaagcaagaattgaggcccaggtgaaggcggctgaagctgctgcacaattaaagctagacgaagaaatgaggatgaagagggagcaggaaagacgagcagcacgcctggcactacacatgatgaagaagactgttgatattgacaacagtgacttccttaaggacctggaaaacttaagcaaaaagtgggagctgaatccccctggcaaacttattgttgattttgtcgacaggatcgatctaccacctggcttaaggagtccgctagagaggcttggccttttcatgaaaaaggatcttgaggaagaggtccaacatgaaatggaggacagtgtatcaccatctacggagatcgacgtggaggaaggagagatcagc

SEQ ID NO: 42284 - DNA, 530 bp, Oryza sativa
  Clone ID: uC-osroM202014d05b1
gtaattgtgagcttgactgagaaaaatgagaccttgtgtaaagaataccagtctttgattgagaactacaatgctttggaggatgagaatggaacccttctttcagaatgcatgaggctcgagcacttgtctttgttccttaggggccataacaatgaggtagcaactgcattgggatctcttactgatgagatggctttgttgagtgtaggtaaggatgaacttgattgcgaagtccaagagcttagcagaagaggtatgatgcttgaatcggaaaacaataacctaaaggagtattttatctacctgatagagattctcagcgctcagttagccctctcagagtttgatttgaatatcaacaaaagcatttgccaggagttggccagtgaacttgagagctgcatggcacagctgtcgcagaaggatgatgagctacttgaagcagaagataaggttcatttgttgcaggaaagaaccgagattatgtggagttgttggctcgcttcaagttgcattgaggggctaaa

SEQ ID NO: 42285 - DNA, 425 bp, Oryza sativa
  Clone ID: uC-osroM202014d06b1
tttcttcctctctctcgtgttcttctccctgttgttcttcttcttcttcatcttctaccttagatagttcgattgaggtgtagttcctttgagtgcagcaagaagctgatgattctgatgacagcttaaggatcttgccaaactcttgtgttgggagtagttgcttgcagatcgagctgcaaaggtcccattttgcttctccatctgagcttggttaggtcgcgtctgagtacacttctgaggcttctttggtcgttttggcctccagctccgttcttaaactatgcctggatcgatcgatctcatctcatctgcgctgttcttgctgctgtcgctgttcaattatgagaagaaggtgccgatcgagttgagccgatcgggttcagcgaaattcacttgcgttgttgagagacactgttgagttg

SEQ ID NO: 42286 - DNA, 505 bp, Oryza sativa
  Clone ID: uC-osroM202014d08b1
tttcttcaccaccggcaccgccgcagcataagcagcgcttccgcaggagggaagatgccggcggggcacgggctgcgggcgcggacgcgcgacctattcgcgcggccgttccgcaagaagggttacatcccgctcaccacctacctgaggacgtacaagatcggcgattacgtcgacgtcaaggtgaacggcgccgtgcacaagggcatgccgcacaagttctaccacggccgcaccggccgcgtctggaacgtcaccaagcgcgccatcggcgtcgagatcaacaagctggtcggtaaccgcatcatcaggaagaggatccatgtccgtgtggagcatgtccagccatccaggcgcaccgaggagctccgcctgaggaaaatcaagaacgaacagcttaaggctgatgccaaggcccgtggtgaggttatcagcaccaagagacagcccgagggacccaaacctggtttcatggttgaaggtgctacgctgagactggtacccc

SEQ ID NO: 42287 - DNA, 422 bp, Oryza sativa
  Clone ID: uC-osroM202014d09b1
tctttttccggtgaaaattttggcctctttttcggaagttttttttttcttcccctctcgttctctttttattccaccgctttgtcgttctcgcaatctcgctgtccaccttccccacccccccccccccatttactcgatcatcacaacgtgccaatcaattaatcgatcgatcagttttgtgcgtacgtgagcgtgtggagagggagagaaatggacatggaaatcgcggtttttctgaggtactgtgctggaggaggaagaagaagaagaagaagaagcagctattgttgctgctgctgctttctgggattccgaggaggcgatatgcttcgcaacagatcgaggagatcagtcggtgccaagcaaggaggcgtcaccgccatggcgcatcctgagccgccgccggcgtcatcgcaatc

SEQ ID NO: 42288 - DNA, 428 bp, Oryza sativa
  Clone ID: uC-osroM202014d10b1
tttgtaaccgacttactacaaatggacacaagggattttccttcaactactgaaaagaggactggcctatcaggctgaggtaccggttaattggtgccctgctcttggaactgttctggcgaatgaagaagtaatagatggtgtcagtgaacgtggtggtcatcctgttatacgaaagccaatgcgccagtggatgctgaggattacatcttatgctgatcaacttattgaagatttggatgaacttgattggcctgagagcatcaaagaaatgcaaagaaactggatagggagatcagaaggcgctgagcttgaattctcagctgtggacaaggaagggcacgatctaagtgctaatttgttagtttacacaacatgacctgacacaatttttggtgcaacatatgttgttttggcacccgagcatt

SEQ ID NO: 42289 - DNA, 393 bp, Oryza sativa
  Clone ID: uC-osroM202014d11b1
tttctcctccctccctgctcgcgctctcagtctcccccatccccaatcaccttactagcttagtagctttgtgaatcaatcaaggccagggtttgttcagatcatccttccctcccatttgcccatgccttggctttgatccgaccaggcatggagggcggtggcacgaggacgcgccgtcgcgccgtcaccgcgagccctggacgcaacatggtctgggtcgagccaccgggcaagactcatcacctgcgctcgccgcccccgcccccttccccgtcctcctcaaagagggtggccgtcgtctactacctctgccgcaatcgccatcttgaacacccccactttattgaggtgccactcgcctcaccggacggcctttacctgcgagatgtg

SEQ ID NO: 42290 - DNA, 479 bp, Oryza sativa
  Clone ID: uC-osroM202014e01b1
ttttatcaagagatcgatcatatcgtattttggagtaatttagcagctagctagtgcagctgcaagctattagcgactgcctgctttgatcgatccatctagctcattgttgaatccatctaagcttaatggctctgcagcagagcatggcgatgccgatgatggtagtgtctgaccttggcaccgctcctcggtcatcgccgatggttcagctgcagaggatgaagaagcatctggtggaggtggcggcgttcaagaacagaaccaaggcttcccccaaggtggacaagtcgaacaagaacaagtcgatcgtggaggacggcatcttcggcacctccggcggcatcgggttcaccaaggagaacgagctgttcgtggggagggtggccatgctggggttcgcggcgtccctccctggcgaggcggtcaccgggaagggcatcctggcgcagctcaacctgaagacgggcattcccatc

SEQ ID NO: 42291 - DNA, 493 bp, Oryza sativa
  Clone ID: uC-osroM202014e02b1
tttttaaagaaaagaaaaaaagagaggaagaaagcgagaaaaatctcaccttcctcttcctccgctatctagctcgatccccgcaagaaattcgccccggaatctctcgatccgctcgatccattcccccgatctgtcgatcgttccttgcgaaccctcggttcccggggtcccgatccggtcttcgccgcgtcgccgtcgccgccggagtcggagtcggagtcggagggggaggagatgaacggcgccggcgggaaccaccagcagcagcagcagcagcagcagcggctcaggcagcagcagcagcagcaggccctcctgatgcagcaggcgctgcagcagcagcagcagtaccagtccggcgttctcgccgccgccgtcgtggcggccatgacccagatggagcctatttcaaatggcaatcttccaccagggtttgatccatccacatgtcgcagtgtgtatgttgggaatgtgcaccctaatgttactg

SEQ ID NO: 42292 - DNA, 516 bp, Oryza sativa
  unsure (1)..(516): unsure at all n locations
  Clone ID: uC-osroM202014e03b1
tgttcctttcccacatcctcctccgccgccgggtgcttcctaccggctcccgatctccgaggcaagcagcgccgcacccggccgctgccgtcgacgccatggcgttcgagaagatcaaggtcgccaaccccatcgtcgagatggacggtgatgagatgaccaggatattctggcagtctatcaaggacaagcttatctttccatttttggatctggacattaagtactatgacttgggagttctccaccgtgatgcaactgatgacaaggtcaccgtggaggctgcagaggctactctcaagtacaatgtggctattaagtgtgcgacgattactccagatgaggctcgggttaaggagttcaacctatagcaaatgtggaagagccccaatggcacaattaggaatattatcaatggcactgtattcagagagccaattatatgcataaatgtcccaaggcttgttccaggatggactaagccccattgcatnggaaggcatgcttttgttgatc

SEQ ID NO: 42293 - DNA, 520 bp, Oryza sativa
  Clone ID: uC-osroM202014e05b1
gtttgtggtagttgtatttctgggattgattaataagatcaatactcaatgtcctggcttgtgcgaagacgccaacactaacatttgtgcctccggatttgttcagggtctctgtcctggtgcttctaattttgagtgttgtgaaatgagtactcctaactgcaacggacaatgtcaagataactctctaccttgtggcggtatttatattgctggagattgtcctggtcctaataatgttcaatgttgttcttcttctggtcctactccccctcctccccctccttctggaagttgtgcttcttttgctaattctcaatgggattgtactaccccttcatgtagtactattgtccctgctggtactgcccaacctgactatgaatgtgctgagtttgtatcacgatctcttgcttctgcaggattaattcctcttgatccaatggcagatcaatctgagtttagttctttctcagctaatggaaagacctatgatttactttgggtatcttctaaaaat

SEQ ID NO: 42294 - DNA, 446 bp, Oryza sativa
  Clone ID: uC-osroM202014e07b1
tgtcgttctcctatcctctacgtctaaacccggttcctttttcgcctcgttgactccgacgccgccgacgccgtcagatccagcagcttcaggtcggggctgaaccttggacttggagcggccatggcttcggacaacattggctcgagagatgtatgtgttgttggggttgcacgcacccctatgggtggtttcctaggtgccctgtcttccttgtcagctaccaaacttggttccatagcaattgaagctgctctgaagagggcaaatgttgatccagcccttgtgcaagaggtcttctttggtaatgtgtcgagtgctaatttggggcaagctcctgcaagacaagctgctttaggtgcatggattccaaacacaggtgtttgcagcgcagttaacaaagtttgcgcatctggcatgaaagcgacaatgtttgcagcacagtc

SEQ ID NO: 42295 - DNA, 408 bp, Oryza sativa
  Clone ID: uC-osroM202014e08b1
ttttcgtacgtacttgctgctcactatcatgaacaaacagtagctaagctagctatagctacgtttttgttcatatgctgctgttgctgccggctgcttggccgcggggaagcatggcggcggcgatggcgttcctcgcggtggtctgcgcggcggcgatggcggcggtgagcggagcggaggaggtgtacgagttcggctccggcgcgtcgttcatcttcggggactcgctcgtcgacgccggcaacaacaactacatcccctcgctgtccaaggccaacatgacgcccaacggcatcgacttcgccgcctccggcggtatgcccaccggccgcttcaccaacggtcggaccatcgccgacatcatcggagaaatgttgggccagacggactactcgccgccgttcc

SEQ ID NO: 42296 - DNA, 492 bp, Oryza sativa
  Clone ID: uC-osroM202014e09b1
ttttcttacccaatcacatcgccgccatcgtcgagcttgttctaaccttctaagctattagcaatggcgtcttcgtcgtcatcgtcgccgtcgaggccgttgctcaggcgggtgctctcgttcagggagccgctgttgctgatcccttacatcgtcggattcctcgccgccgcctcgtcgggattcttctacagctactcctccttcctccactcgttcgcccggacgctcgtcccggcggccgcggccggcgccgtggtcaagtgcgcgtacttgtcggcggcggcggattccgacgagccatgctcctcctgcggcggcgaggatgaagacgtctttgccgccgtcgaggaggatgaggctcacctgaacaaggtggaggtgggagagatcatggaacggatagggctgggcgtgggcggccatggcgaggggctgaaggcgaggatggggcgcgaccaggtgtctaggctgttcgacgcccacaagccc

SEQ ID NO: 42297 - DNA, 500 bp, Oryza sativa
  unsure (1)..(500): unsure at all n locations
  Clone ID: uC-osroM202014e10b1
tttccactactggagcagagctgagctgagccgagcaggagtggtatacagcagataagactcttgagtgattcaggcaatcaaggcagatgatgtcttcttcaagacctactcaatgttccagttcatccagcaggacccgccaaagctcccgggcatggatattagcacaaacaactcttgatgctgaactcaatgctgaatatgaagaatatggcgactcctttgattactccaaattggttgaagcacagagaactactggacctgagcagcaagctcgttctgagaaggtcatagcttacttgcatcacattcagagagcaaagctaatccaaccatttggttgcttgttggcccttgatgagaagaccttcaatgttatagcgctcagcgagaatgcaccagagatgcttacaactgtcagccatgcagtgccaagtgttgatgatcccncaaagctacgcattggcaccaatgtatggtctcttttcactgac

SEQ ID NO: 42298 - DNA, 352 bp, Oryza sativa
  Clone ID: uC-osroM202014e11b1
tgtatccccctcccatacttctccaggctctggtgtccttttcgtggcatgtgccgtcgttacgacggcgttacaagatgtaacattggcaatggcgtccttcgcctacgccgcagcgggcgtgtgtcaccacgcactaagatccgggcaatatcaggcctacgggcggcctcggcttttgcacgaacaccatcattttcaggccgttggagctcaccaagcgtgggggaggcggtggccacatcttcgtggatgggctgaggcgcgcggtgttgctgcggcttgtgggggacatgccgatgtctgataagactttcacccagcagactatggacgctgtcggggtctaccg

SEQ ID NO: 42299 - DNA, 388 bp, Oryza sativa
  Clone ID: uC-osroM202014f03b1
cgttttctctctctgtatctctctctctctctgggatcttgtagagctccagaagcttccaaccttcggcggcgagatgagctcctctcagggaggcggcggccgcggcaaggctaagacgactaaggcggtgtcgcggtcgtccaaggccgggctccagttccccgttggccgcatcgtccgctacctcaaggccggcatgtacgcggagcgcgtcggcgccggcgcccccgtctaccttttcgtcgtcctcgagtacctcgccgtcgaggtgctggagctggccgggaacgctgcgagggactacaagaagaacaggatcgtgccgcggcacatccatcttggcggtgcgcaacgacgaggagctgagccggctgctgggcaccgt

SEQ ID NO: 42300 - DNA, 448 bp, Oryza sativa
  Clone ID: uC-osroM202014f07b1
tcccgtcccgtttttccgggttcgccccacgcgtcttttttcggcggtgcctcaggggcgtctctcgcgggtgtctaggaagcaagggtcgccgacgaaggagttgccgaagcagaggctcgtgatgggggagatccggatcctcatgcgcgacgaggagccgccggtttgctcaccgtcgcctgctccggttgcggcgcaagccgcggcggttgaccagcgggcgccccgtgttccggctgtggcgcatgccgcgccgactgaccagaaggcgcctcgccccgccagatcgaagcagcagcagcacacggccgctgtgccgacgaagatcaagtccgtcgccgacgcgccagtctacgccggcccggccttctcctcggcttcgcctgagccgagctcccttccctttccggtcttcattcgtcgcgccgaggccgaggcgacccgc

SEQ ID NO: 42301 - DNA, 534 bp, Oryza sativa
  Clone ID: uC-osroM202014f08b1
tttctacacctcattttccgcttgcatcttgctcattcagatctcttctgctttgagcaatggccaacctcaccgacctcgttaacctcaacctcagcgactgcagcgacaagatcatcgccgagtacatctgggttggaggatcgggcatagacctcaggagcaaagcgaggactgtgaaaggccccatcaccgatgtgagccagctgccgaagtggaactacgacggctccagcaccgggcaggctcccggcgaggacagcgaagtgatcctctaccctcaagccattttcaaggacccgttcaggaggggcgacaacatccttgtgatgtgcgactgctacacgccacaaggtgagccaatccccactaacaagaggcacagtgccgccaagatcttcagccaccctgatgttgttgctgaggtgccatggtacggtattgagcaggagtacacactccttcataggatgtgaactggccccttggctggccagttggtggcttccctggcccacaggaccatactactgg

SEQ ID NO: 42302 - DNA, 460 bp, Oryza sativa
  Clone ID: uC-osroM202014f11b1
gtctcgagagattcaggaacagaaaccgccgagagagttcgtagcagtcaacgcgcgaggcagggccgagaagaaaccgccggcgacgcacgcgcgatggacgctcggcggaggcggttgtccccggcggtggccgtggcggcggctcttcttttcttccccatgttcttcgggagccatacgccggcggcggcggcggcgtacggagaggcttcaggcgacgccggcgtgacggcgctgcagaagcacgcggcgttcttcgacaaggacggcgacggcatcgtctccctctccgagacatacgacgggttacgagcactcggactcgggtctggcctctccagcttgagcgccgccttcatcaatggcgtcctttccccaaagaccagacctgacaatggaacagcaccacgcttatctatctacatagagaacatctacaaggggattcatggaagcg

SEQ ID NO: 42303 - DNA, 501 bp, Oryza sativa
  Clone ID: uC-osroM202014g01b1
cctttcgccaatcacatcgcctcctccgattcccaaggattcttcccgctctctttccttccttccccattcatccgcttcttcttcttcttcttattcttctttcttgttccgatcggggattcggatttggggattccgaggcagcggccgcggcggaggcggagagagggagaggatggggtacgtggggcagcacggggtggcgacgctgcggaggtacaagtacagcggcgtcgaccactcgctcgtcgccaagtacatcctccagcccttctggtcacgattcgtcaacctcttcccgctctggttcccgccaaatatgattacactgacaggcttcatgtttctattgacatcggcattccttggctttttttattcccctcatctcgatacagcaccacctagatgggtgcaccttgcacatggaatgcttctcttcctttaccagacttttgatgctgtggatgggaaacaagcaagacgtaccaactcatc

SEQ ID NO: 42304 - DNA, 393 bp, Oryza sativa
  Clone ID: uC-osroM202014g04b1
gttttccttccttcatggagggatgcttggctgccctctgctgctgctgtctcctggacgcctgcttctgaggatagaggcgacgggtgcaagagagctgaagagatttgtttcatggagctgatcaaaccgaactgctatgagaaaatgctgctagatttcgtgttcggcattattacctgttattcgccttgtttatgaacctctctgaacctgatttatttgatcagtgtttgatggatggctaaaactatatagttgtgtactactgttgattccaatcttgctggtggaattcaacccgggttgcggagtgcaagttgaattcgttcttgttatgtctgccatttgatttctttaccattgctgcggggtaacacttgcgttgctttg

SEQ ID NO: 42305 - DNA, 295 bp, Oryza sativa
  Clone ID: uC-osroM202014g06b1
cgcttctctagtgccccaaggggatgaggacgctgagcacagggctggctctgagcacactggtgctgagaggcttggcgaacgaggaggtaggagaagacgtccacaagctcaccggtgaacatcacccctggctggacccagacctgaaccaggtgcaggtagccatactgtactgagtcctggacggagcctgactggacaacctccaggtatacatcggctggcgaggcacacacaagcacaaaacactttcttcacccagacgggcgctaggaagcatgtgcccaaggcc

SEQ ID NO: 42306 - DNA, 405 bp, Oryza sativa
  Clone ID: uC-osroM202014g07b1
tctaggttgctcgacaaacaataatatcagttgatactatgtcatctacgcgttggtcactggcaatcaataaacaagaaattgatgacttcacagttcatgtggattcggagaacttggttccactgggtaataagagcgagatcgatgggtggcatacaatccagcttgctggtggtaaggactcaccaacaaaatttcagctaacccttttctgggcaagtaattccaaggatgcattcccaatgcaagtcgaatcagaagatcattctttcttactaaaactaagaacggatgtgaatagagttacaccgctggttggcagggttctcgagaagcttccaagatggtgtgcaccctttggcaagtctacttctccttatacattggctttcttgaccgctc

SEQ ID NO: 42307 - DNA, 448 bp, Oryza sativa
  Clone ID: uC-osroM202014g08b1
agcaaaagtacaatatcctttgtacggacgcctagctaagctaagctaattaagctctaatttctcttttcttttttcttcgatctccggcgaaaaagtaagtacaatggccgaggtgaacggagccaataacggcaacggccaccacggccacggcaacggcagcggcgctgcggcggcggcggggcggtcgacgagtgtgtcgaggaagatcgagtcggagggggcggtgctgatgcccggggtgtacgacgcgctgtcggcggcgatcgtccagaagaccgggttctacgccggcttcatctccggctacgccgtctccggctccttcctcggcacccccgacgtcggcctcctcacgccgccggagatggcggaagtggcgaggcggatctgcgcgtcggcgcccaacacactcttcatcgccgacgccgacactggtgggggc

SEQ ID NO: 42308 - DNA, 335 bp, Oryza sativa
  Clone ID: uC-osroM202014g09b1
tttttcttcaagaaggtcattggtgatttcaagcaagcatagtctgtgcctcccgttcagaaaaaggctgctccccctaaggaatcaaaagcaaaggaggccaagatggaggctccgaaggaggcccctaaaccaaaggttgaggcttcagaggaagaggaggcaccaaagccaaagccaaagaatcctcttgatctactgccaccaagcaagatgattcttgatgagtggaagaggctatactcaaacacaaaaaccaacttccgtgaaattgccattcaaggtttctgggacatgcatgacccacagggttactctctgtggttctgggactt

SEQ ID NO: 42309 - DNA, 439 bp, Oryza sativa
  Clone ID: uC-osroM202014g11b1
tttcttcctccgcgagtgccccaaggggatgaagacgatgagcacggggctgttcctgagcacgctctcgctggggttcttcgtcagctcggcgctcgtcgccgccgtccacaagctcaccggcgaccgccacccctggctcgccgacgacctcaacaagggccagctccacaagttctactggctcctcgccggcgtctgcctcgccaacctcctcgtatacctcgtcgccgccaggtggtacaagtacaaggccggccgcgccgccgccgccggcgacggcggcgtcgagatggccgacgccgagccatgcctccactgatccacaccgtccatccatccatccatcagacggctacgatttcttcttcgcatcttgtactatatatatactagtatactactagtacgtacgtacgtacgtgtgtaccaagcgagg

SEQ ID NO: 42310 - DNA, 275 bp, Oryza sativa
  Clone ID: uC-osroM202014g12b1
ttctgaaagaaacccgatggcgtcgccgccgggggccgcgccgcctgagtgggttgtattggaccgcttaccgctcacctccatcgacctccctaaggacggcatctccctctcgctcgtcgcaaccccgcgcatcttgcagctcctcgtgtccccttcgctcggcctcgcctcaggcagcgtcctcgccgttgaccccttcggcaatcttctactttccagcttcgatccgtttcttgccgacagcaagtcctaccgttccctgggacgcagtc

SEQ ID NO: 42311 - DNA, 469 bp, Oryza sativa
  Clone ID: uC-osroM202014h01b1
gttcttggatatatttgactccatggacattgacgtttactgtttgctccttgacgccaagtagaaaatggtttgtgcattttgcatcttattttttgtagtgtgaatgacggaattggacctgtgtagtacgttctataagtccttaggttggaaacttggaatagccagcagaaaagacgtatagtgatgtggagttgtgcacgggcttcacttggaaaattttatctggtcccaactcttctcctgggtttgttggctaaccactcgcctaatctagctaggagttcagcttctgcaagtcaggttacacacctaattcattgttcttcatttcataatgttaacctaaacatgataggtttggcattgcggatgtgaacaaggctaatgattgcaacttctcacaagtccacttaattgtctcatctcaaatatatatatatatatatatatatatatatatata

SEQ ID NO: 42312 - DNA, 529 bp, Oryza sativa
  Clone ID: uC-osroM202014h02b1
ttatatgccttaccatatgcatataaaccttgagcttttggaagccactcacttgatttgtgccatgctgattgaggtccccaatatggctgccagtacttatgacaggaggaagtctatgaacagaacattccgtaggcttcttgagatcagtgagaggcagacttctgtcgggccaccagaaaatgtgagggaccatgtaatggctgcaacaagaaccctccgcaagggtgactaccagaaggctttcgatgtcattaattcgctggagatctggaagcttttgaggaacaaggagcatgctcttgagatgctgaaacttaagatcaaagaagaagctcttagaacctatctatcgtcatactcttcttgctacgagtccctgagccttgaccagctcactacaatgtttgaccttagtgagcaacaagctcatatcattgttagcaagatgatgatgcatgaagagcttcatgccagctgggatcaaccaaccaagtgcattatttttcacaatgttgatcaaact

SEQ ID NO: 42313 - DNA, 455 bp, Oryza sativa
  Clone ID: uC-osroM202014h05b1
gcgcttttatcaacacccagcacaaaggcgaaacggggaaaaagaggaggaaaacagcaagaggacgcgaggggtcggtgtgggagagggaggctacactacagcagcagctgaagcagagcgggagagtgatgagggagtgagaccaggccagcctagccaggcccggtcgctcggaaagtgcggagccgtttcccctatatctccactctctgcagggccaggtgctcactgcgctgcgcctcttaacacgcaccacccgtactacgtgcccacccgcgcgcgcgccgaggagaagagacccactaccgtacatgcgtgcgcgccatgtcgtccgacgctgggggcagcgggtacggcggctgccatggtggaggcgcggagcaccaccaccagcaccacagggacgccggtcacctactgctccaccaccatgcgcagcacgtggccggcgc

SEQ ID NO: 42314 - DNA, 414 bp, Oryza sativa
  Clone ID: uC-osroM202014h07b1
gacccggactttttggtcctggtggagatgaagaacgaggcacaggccgttcgcgtccacgacctcactggcttctacctgtggatgaagaacgaaccggatgcctacgtgaccatggtggtcgtctgcttcaaagacctgctcggaccagcactagtcatatcccccattacttactgcatgcgccacatggacttcatgcacatcctcatggaggagcaggccaaggcaggcaagccacggacggagctgatggacatcactctctagatcgacaaggagaaccaggtgatggtggagctgaacgtgtacaggacgaactccaccgaggaggacagcctgatccgcacgcaagagttcgacaacgcgtgcatcgaggcacgactggagagctacagcggaacatgatccaga

SEQ ID NO: 42315 - DNA, 473 bp, Oryza sativa
  Clone ID: uC-osroM202014h09b1
ttctttctcctccccttccctcccctcccccgcgcgcggtggtggttcgccggagcgcagcagcagcagcagcaaaaggccgcgagggccgccgtcgggatccccgccgccgccaagatgaacgacgccgatgtcgccaagcagatccagcagatggtgcggttcatccgccaggaggccgaggagaaggccagcgagatctccgtctccgccgaggaggagttcaatattgagaagcttcaacttgttgaagctgagaaaaagaagatcaggcaagaatatgaacggaaagagaagcaagtcgaagttagaaagaaaattgagtactctatgcagctgaatgcttctcgcatcaaagtgcttcaagctcaggatgatttggctaattccatgaaagaagatgctacaaagcaactcctgcgtgtcagccacaaccaccatgaatacaagaaccttttgaaagaactcgtcgt

SEQ ID NO: 42316 - DNA, 437 bp, Oryza sativa
  Clone ID: uC-osroM202016a01b1
ttcttctgtagttgactgacagtgatagtggcagtcatgctggtcgtgggaaccgtgcgtgtcagtggctgcggcgcggtggtggcgccctcgcgccggcagtgccacgtgtccgcggcggtgctgacggccgcggagacggcgacggcgacgcggcgccgcgtgacgcactcgatgccgccggagaaggcggaggtgttccggtcgctggaagggtgggcgaggtcgtcgctgctgcctctgctcaagcccgtggaggagtgctggcagccgacggacttcctgccggactcgtcgtcggagatgttcgagcaccaggtccacgagctccgtgcgcgcgccgtggggctccccgacgagtacttcgtcgtgctggtcggggacatgattaccgaggaggcgctgccgacgtaccagaccatgatcaacacgctcga

SEQ ID NO: 42317 - DNA, 453 bp, Oryza sativa
  Clone ID: uC-osroM202016a02b1
ttcttccttctccgcctccgctgagctctgaccgcttccgccatggccgcctcgcgggggccgccgcttctagggttccgagccctcgcgctcgcgctgctgctcgcgatcctcctcttgctcggctgctccgcccccgccgcgtatgcgggggcggagggggtgctgaggcaggtggttgttaggaggggcgactactgtggtggtgggaacttcttcgagccgttcaacgtgacgtacgaccaccgcgcggtgctcatcggtgggaagcggaggatgctcgtctccgcggggctgcactacccgcgcgccacatccgagatgtggcctagtttaattgcaaagtgcaaggagggtggcgcagatgtaattgagacctatgtcttttggaatggccatgagccagccaaaggtcagtattactttgaagaagatttgatcttgtgaaatttg

SEQ ID NO: 42318 - DNA, 450 bp, Oryza sativa
  Clone ID: uC-osroM202016a03b1
acaactaagttcgattttattcttttagaaataaactgcaggtgggggaggtggggtaacaggtacaaaaatacgagaggttgcaatataagaggcagcaagactagcgctgtctacacaaccactgaaggaatatgcaccagaagcaccagcccaggtaccttgaccatctacgatattaccagcaccaccaaaacagtacaaagtagaactagcttcagtatagaaaggagtaagagaaccagcatagtcaatgtaatgatcagtatgagtttggtgaataccgaaggtagcattaccagtgaaggtaggagtagttccaacattaaaagttatttgggcaacactaatagaaccaatgactgtattaatggtctcagaaacattaccagcagcagcgatctcagtatcaatatgctatgatggagccttcatgtgacagacatagac

SEQ ID NO: 42319 - DNA, 544 bp, Oryza sativa
  Clone ID: uC-osroM202016a04b1
tacacatctcctcatctcttggcggcggcggcggcggcgatgggcgcggtatcggtgcaaccaacggcggcggcggcgaccgccgagcaggcgcaggatctcatcgacgccgctaggtacgatgacctggaggacgtcgtcgcgctgttcaccgccggtgtttccctagactccgtggattcgcaaggacgaacggcacttcatatggcctctgccaatggacatctcgctgtggtgcagtacttgatccaaaatggagcgaatgttaatgctacaaactcagagaagaacacacccctccattgggcatgcctcaatggacatatcgaggtaattaaagcgttgatatgcgctggggctagtgtcagtgcactgaacagccatgagaaaacccctatggatgaagcagtgacgaagggcaagatggaggtgatcgatgcaatcggtgcagcagtagctcatgcagaactcgatggtgtcactgtctcctaaaaggacttggtactcctttctgacggtcctctccttgacaatggatgacata

SEQ ID NO: 42320 - DNA, 419 bp, Oryza sativa
  Clone ID: uC-osroM202016a06b1
tcttctctctcctctctctctctccagtctgcaggttcgaggagaggccaatggcggacgccgactcgagggccccgcccaaatcggaccccggtgccacgccgatcggttcgatctccccttcctccgccgcccccgccgccggggaggacgaggtggaggtggaggagcagctcgccggactcgccatcgccgatcagggggaggagctgctgcttcccaagcccaccggctgggaggatggccctgttgttgttgctggagatgaggtctcccgtggtgagaagctgtcgggtgaggtggcggccgcggtgggggtggagggtgctgcagcggattcgaggccgcggttcccgaggcgacccggggagcccgactgcacctactacgtcaagttcgggagctgccgctttgggatg

SEQ ID NO: 42321 - DNA, 291 bp, Oryza sativa
  Clone ID: uC-osroM202016a07b1
tctttcttcactggcaggactggaacactggatgagtatactgaatcttttggcaacgacttgtatttacttggaagaggtggtttgccttgagtagatcaaaacctacatttggggttgcttgctttatgtagtcaaggtgtagtgatatgttctttttcttgttgtttgttttgtcttttaccagaaaatataattcataagctactcttgtgaaatgagtaccaattttatgtattctcagacgcttctgacatgcattatgttagggaaaacagaacaacgttgtat

SEQ ID NO: 42322 - DNA, 438 bp, Oryza sativa
  Clone ID: uC-osroM202016a11b1
gcactagatcgctagctttccgccctatcttattttctttttggggggtttttttttactgtgcggttacacaaatattgctatattactagcactctggcatttccagggaggagctttaacagcttgtttttacagagctacacatgtttctagggaagagcattacatacaaaaagcattagggattacttcttttttttctctctcattcaaacgcaaatagcatatgaacagatgtcaacagattatttctcccccataaacaaactcatcatgattctctcacaaaacactcactctgcacaaacattgccttacttcccactaccatcattagtccagacactgtcccaggagttgttagcttttggggccttagcaaaatgatgccctggaccttcaaacgaagaagtttctgcgccctgaaccccaccc

SEQ ID NO: 42323 - DNA, 509 bp, Oryza sativa
  Clone ID: uC-osroM202016b02b1
gagagttcatcagcatccacatcggccaggccgggatccaggtcggcaacgcgtgctgggagctctactgcctcgagcacggcatcgagcccgatggcaccatgcccagtgatacaacggttggcgtcgcacacgatgcgttcaacactttcttcagcgagacgggcgctggcaagcatgtgcccagggccatctttgtcgacctggagcccactgtcatcgacgaggtgcgcactgggtcgtaccgtcagctcttccaccctgagcagctcatctctgggaaggaggatgccgctaacaactttgcccgtggccattacactgttggaaaggagatcgtagatctatgcctggaccgtgtgcgcaagttggcagacaactgcactgggctgcagggattcttggtgttcaatgctgttggtggtggaactggatcaggacttggttctcttctgttggagcgtctcttctgtgattatggaaagaagtccaagcttggcttcacaatt

SEQ ID NO: 42324 - DNA, 429 bp, Oryza sativa
  Clone ID: uC-osroM202016b05b1
tcttttttttcctatctctatgtccagtctccacgttctatgagaggccactggcggtcgcctactcgagggccctggccaaatcggaccccggagccacgccgatcggttcgatctccccttgctccggcgcccccgtcgccggggaggacgaggtggaggtggaggagcagctcgccggactcggcatcgccgatcagggggaggagctgctgcttcccaagcccaccgtctgggaggatggccctgttgttgttgctggagatgaggacttcaggggcgagaagatgccgggtgtggtggccgcagcagtgggtgtggagggtgctgatgaggattcgaggccgcggtttcctaggcgaccacgggagccggactgcacctactacgtcaagttcgagagctgccgctttgggatgaagtgcaagt

SEQ ID NO: 42325 - DNA, 554 bp, Oryza sativa
  Clone ID: uC-osroM202016b06b1
ttcgtttccttcccctttcccccctcacctgtctggtcttctccgccgcaccaatccgccccctcgcgattcgaccagatcggcgcgagggcatatcatggcattgaagcggatcctcaaggaactaaaggacctgcagaaagatcctccaacatcatgcagtgcaggtcctgctggtgaggatatgttccattggcaggcgaccattatgggtcctccagatagtccctatgctggtggagttttcttagtgaatattcatttccccccggactaccccttcaagcctccaaaggtatcttttaagacaaaggtcttccatccaaacatcaatagcaatggaagcatatgccttgacattcttaaggagcaatggagccctgctttgaccatttctaaggtgttgctttcgatctgctcgctgctcactgaccccaacccggacgaccctcttgtccctgagattgcccacatgtacatgacggatcgtccaaagtatgagacgacagcccgcagctggacccagaagtatgccatgggatgatgaaacccac

SEQ ID NO: 42326 - DNA, 401 bp, Oryza sativa
  Clone ID: uC-osroM202016b07b1
tggttttcgccatggctaccacccaccacctggagctccccctctccattcccaatctctccgactcctcctaattaatcccgtattcccaccccccaagccaaggacagcatctcgcatccgcgtccttcaattgatttgattgggttccccccctccatttcagggtttcgtttcgcatcgcagcaatcttcccgacccagcaagcttcttcttcccttgggtccgttagggtttgagattgagaggggcggcgctggcgatcgagattggtacggcggcggaggcggaggtgggcggataatgtgtatactgtgcgccgtgcaacggtggtcgcggcgcgtcgccaccatgctgccatggctggtgctcccgctcatcctgctctgggcgctctccca

SEQ ID NO: 42327 - DNA, 516 bp, Oryza sativa
  Clone ID: uC-osroM202016b08b1
cattaaacaagctgtgttaacttcttttttcgtgacaagtttaattctttctcgatcgatcgtcgtgatggctgacgagtacggccgcggcggctacggcaggtccggcgccggcgccggcgacgactacgagagcggcggctacaacaggtccagctccggcggcgccgacgagtacggccgccggccgggaggcggtgccggtggctacaacaagcccggtggcaccgacgactacgacagcggctacaacaagtccgccggcggcgacgacgacgactacggccgcaccggcggcggcgggtacaacaagtccggcaccgacgacgactacgacagcggctacaacaacaggtcaggggctaacgagaagtacggtcgcaacaagtccggcgacgacgagtacagcggcggcggcggcgccgaagccgacgaggagtacgtcgacgggttgtcgtcccgggacgacccggagaagtacaaggtggaggagtaggagcacatgaacaggagcgc

SEQ ID NO: 42328 - DNA, 511 bp, Oryza sativa
  Clone ID: uC-osroM202016b09b1
tccgcgcccccacacctcgcctcctcctcggcttggatctcgccgcatcatctgccgccgacgacgacgaagaggaagacgaccgccatggggacggcgagcggggaccagccggcgggggcgtcgtcggacaagctgcggcacgtggagtccatgtcggagctgccctccggcgccggcaggatctccgggatcaacgccgtcgtcctcggcgagtcactcgccgccgaggagcacgacctcgtctacccctccgccgagttctccgccgacgccctcgtgccctcccccaagaagtaccaaaagatgtatgagaggtcaatcaacgacccggccgggttctggtcggagatcgccgacgccttctactggaaggagaagtggaaccccagtgaggtctgctccgagaacctcgacgtcaccaaggggcctgtccagatcagttggttaaaggtggcaaaacatacatatgttacaatgctgctgatcgcaacatcgaggctgggaacgg

SEQ ID NO: 42329 - DNA, 539 bp, Oryza sativa
  Clone ID: uC-osroM202016b10b1
ttcctcgcatcccaaaatggcggcggccacctccacttcctccaccgcgctcgcccaccccaaaaccctaaaccccgccgccgccgcggcgccgtggccgccaaggtctcgtcgccgcaggtgatcggggccaccatgccgtcgctggacttcgagacatccgtcttcaagaaggagaaggtgtctctagctggccatgacgagtatattgtgaggggcgggaggaatctgttcccgctgctgccggaggcgttcaaggggatcaagcagatcggcgtaatcggatggggttctcagggtcctgcacaagctcagaacctgagggactcacttgctgaggcaaaatcagatcatcgttgttaagattggtctccggaaaggttctaaatcttttgaagaagcacgcgcagctggatttactgaagagagtgggacacttggagatatatgggagactatctcaagtagcgatcttttgttgtggtgatatcagatgctgctcaggcggataactatgaggaaattttctcacacatgaa

SEQ ID NO: 42330 - DNA, 472 bp, Oryza sativa
  Clone ID: uC-osroM202016b11b1
tttccttttggccgcgcactcctcctcctcctcgcgctgcacacgccaacgggttacaagaacgagttggcacgcgagagccctgcagggaggaggaaggatgcacctgcacgcgaagacggactcggaggtgacgtcgagcatggcggcgtcgtcgccgccgcgggcggcctactacgtgcagtcgccgagccacgacgacggggagaacaagacggcggcgtcgtacttccactcctcccccgcggcgtcgccgccgcgctccctcggcaaccactcccgcgagtcctcctcctcccgcttctccgccgccaagtccggctcctcccgccgcaccgtcgtcgtcgggggagacggcggcaaaggcggtgtcgcggctggccgctgcggctgatgtggtggtggtggtgggcggcgtatcccgtggatgaaggaggcggtcatcgaggaggaaggcctgctgatggaggac

SEQ ID NO: 42331 - DNA, 508 bp, Oryza sativa
  Clone ID: uC-osroM202016c01b1
tttagtgtgaaagaacctctctgcagtgctgctgctgctagcttgcagaaaaaaaaaactctcatcttttgcaggaagagacatcactgtttctgcattcgtgtgcatttggattaagctttgcttatccctttttagtggagattgttgagtatatcaggtctatatattggcagctctggttggagatagacactcacactgagccaagatggggagtttgcacaagttcagtgttattctcctcatgttatgttttgctacgttggggagcgctcagtatgtcaagtataaggatccgaagcagcccgtctctgttcgtgtcaaggatctgctcggccggatgactctcgctgagaagattggccagatgacccaaatcgagagggagaatgccacggcggagcagattgccaagtacttcataggtagtgtactgagtggtggaggcagtgtgcctgctcctcaggcatcagctcaggcttgggcttcatggtgaatgaaatgc

SEQ ID NO: 42332 - DNA, 528 bp, Oryza sativa
  unsure (1)..(528): unsure at all n locations
  Clone ID: uC-osroM202016c02b1
ttcncttcatccagctcactgcataatcacacactaattaacaagctaattagctgctgtaattagctgcattgaattcatggagaggggtcagaagaagaagctggcgacgttggtcgggtgcaactacgccggcacgcccaacgagctgcagggctgcatcaacgacgtcgccgcgatgcgcgacgccctcgtcgcccgcttcggcttcgcgccggccgacgtcaccgtgctcaccgacgaccgcggctcgccggtgctccccaccggcgccaacatcaagcgcgcgctggccgacatggtcgcccgcgcggcgcccggcgacgttctcttcttccactacagcggccacggcacgctcgtcccgccggtgaaggggcgccgccacggccacggcgagtgcgacgaggccatcgtgccctgcgacttcaacctcatcaccgacgtcgacttccgccggctcgtggaccgcgtgccgcgcggcgcgagcttcaccatggtgtccgactcgtgccacagcggcgggct

SEQ ID NO: 42333 - DNA, 479 bp, Oryza sativa
  Clone ID: uC-osroM202016c03b1
tgtctttcttccacgacgcacttagctaagctagcgtatagtctatgatcgatccgatctccgacgacgacgacgacgatggccggtaaagtaagcgcggtggtgctggtggcgttggtggtggtggcggcggcggcgggcggcgcggccgggctgtcgatgtgcggcgtcgaccggtcggccgtggcgctgtgccggtcgtactgcacggtggggagcgcggagaaggcgccgacgaaggagtgctgcaaggcggtggcgaacgccgacttccagtgcctctgcgaccgcagggacatgctccgcaacctggagaacatcgacgccgaccgcgccacgcagatcccgtccaagtgcggcgtccccggggcctcctccagctgcaagtaatttacattaggtgatcgagatgatcactctagctagccagctgcaaaatcacactctagctagctagatgatcgatgatcgatgatcac

SEQ ID NO: 42334 - DNA, 480 bp, Oryza sativa
  unsure (1)..(480): unsure at all n locations
  Clone ID: uC-osroM202016c04b1
aaaaaatattgaaagatgagtttacactactaaaaaactctcatagagaccggttcataggtgccggttcatttaaaaccggcacctatagagcttttcctacctccttgcggtgaaaaaatgtagaaccggcacctttaagaacatttgaaccggcacctataatatagatgctggttttttaaaagaaccggcacctaataatttttataggggccggttgtttttaaaaaccagcacctatagcgtttggccgagctgattcgagccgagcccacgcacggcacccatcgcgtccttatctatccctccccttctcgatctctcacgtctctctaactctgctctctctctctctcgctgtcctctctctccctcccctctcccgccgtctngcggtcggcggctggccagcggaggcggcagcggtggtcgcgccctcccctccgtcagatccggcnggaggggaggcggtgggct

SEQ ID NO: 42335 - DNA, 528 bp, Oryza sativa
  Clone ID: uC-osroM202016c05b1
tcttttcctccggctcttcttcagtatcgaatcctctcttctcctcgtgcccaccaccaccaccgtagcaatggcgggcaacgggccgatcaacatggaggacccgctcaactggggcgcggcggcggccgagatggccggcagccacctcgacgaggtgaagcgcatggtggcgcagttccgcgagccgctggtcaagatccagggcgccaccctccgcgtcggccaggtggccgccgtcgcccaggccaaggacgccgccggcgtcgccgtcgagctcgacgaggaggcccgcccccgcgtcaaggccagcagcgagtggatcctcaactgcatcgcccacggcggcgacatctacggcgtcaccaccggcttcggcggcacctcccaccgtcgcaccaaggacggccccgccctccaagtcgagctcctcaggcatctcaacgccggaatcttcggcactggctccgatggccacacgctgccgtcggagacggtgcgggcggtcatgctcgtgcgcatcaacac

SEQ ID NO: 42336 - DNA, 484 bp, Oryza sativa
  Clone ID: uC-osroM202016c07b1
tttagaactcccccccctcctcgctccccgccgccgccgccgttttcttggagaggagaaatccgtaggctcagaggatttttggtagtcttgtttcgtgatattcgtgaagagggggggagctaaggggggattcgtaagatcagaattggatcacgcgggggcgcgctcgggatcgggggttccaaacacagcttcttcgttgaatttaagtggatgtactaatggagtcaaagggtggcaaaaagaagtctagcagtagtcgttccttgatgtatgaagctccccttggctacagcattgaggacgttcgacctgccggaggcgtgaagaagttccagtctgctgcttactccaactgcgcgaagaagccatcctgatagccctttcggcttctccatcctagtagtttaagatttcttgcaattccattttggcacttttcttctgacctatttctctggctgctgcttcctgataatcg

SEQ ID NO: 42337 - DNA, 324 bp, Oryza sativa
  Clone ID: uC-osroM202016c09b1
tgcctagatcgcgagcggccgccctggtggggcttctttaaaggagaaggtctttgaaaccaagcaagcggtcctcgtccaccgccacgaatgaccatggaagccaagggccacccgacgatcacgatactcacgcgactgacattcagaacatcaccggccacaccaacgctgaggacaggtggccagaatgagaccagaaccgcaaggggggcgccatcgtcatacccaaagacagaaggaccgccgatggtggagcatgagccaaggcccgctacaaggtggcggcagaggcccaaaaaggtggggacaggcaagatggga

SEQ ID NO: 42338 - DNA, 537 bp, Oryza sativa
  Clone ID: uC-osroM202016c10b1
gcgctgcaccatttgtttctacccaagatcaacaggaaccagagagagagatgaacgccgacttcggcgcgcccaaggacctcgcggggggcctccagcagcggaggtctctctaccagcccaccctccctccctgcctccagggcgcaacggtgaaggtggagtatggcgacgccaccaccaccatcgacccaacctgcgccaacgtcgtcgcgcaggccttcccccgcacctacggccagccgctcgtcagcttcgtcgcgccgccgcccgacgccgtcgacaaggaccgcgccccgatcagggtaggggtggtgttctccggcaggcagtcgccgggaggccacaacgtgatctggggactccacgacgctctcaaggcttacaatcctcatagtgttctctatggattcgtcggtggcactgagggactgtttgcgaacatgacaatcgagatcacggatgatgttcttgctttatacaagaaccaggtggttttgatttgctcggtagaagtatcgatcagatccgcagcac

SEQ ID NO: 42339 - DNA, 266 bp, Oryza sativa
  Clone ID: uC-osroM202016c11b1
tccacgcagacgaacacgcacccggggcggggacaatcgaagacacggacccgcccaagcaccggaaaagaggcctaccacatcggacgtcccacgaccagaacgacaatacaagccggctaccggacgcaacaaacaagaggatatgcaaccacggcaaaggaacgatcaacccaacctggaaaaccacagacacgaagacacccgaagcgaccaacgagcagccaaccaccaaagatgaagcacacgccgccaacccacggagg

SEQ ID NO: 42340 - DNA, 375 bp, Oryza sativa
  Clone ID: uC-osroM202016c12b1
tctctgaggtgtaccaagtggtggaggcgatggcgcctgtgtacacggtagggtgagctacggtaccggtcggtgcagtggctgaaggcgttctcacaacgagcagcgtgccgggatcaaccactttgtggggctctacgccgtgccggagctcatcttggacatggggtccaccaccaacttgtgcaagaggaactgacggctcatcgacgcagacacgctggagaaggccgggctgctgctgggcctcatggcatgagcgctctgggagcggtcgcgcgcgcgcagtgccggctccaaggccaaggatgcggtgtcttaagcgctgcacagggctatgacctgctttttcgtcgcgtcggtgccacacaccat

SEQ ID NO: 42341 - DNA, 419 bp, Oryza sativa
  Clone ID: uC-osroM202016d03b1
ttcatgcttgccggcgaagtgaaccagagagagtcattcatggaggtggaggaggcttcgtacaggacggtgtggtcggagccgccgaagaggccggcgggaaggaccaagttcagggagacgaggcacccggtgtaccgcggcgtgcggcggctgcggggggcggtcggtcgcggcggggaggtgggtgtgctaggtgcgggtgcccggggcgcgcggctccaggctgtgggtcggcacgttcgccaccgccgaggcggcggtgcgcgcgcacgacgccgccgcgctggcgcttcgcggcagggccgactgcctcaacttcgccgacttcgcgtggcggatgccgtccgatcccgcgtacgtcgtgctcgccggcgcgaggggggtcagggacgccgttgtcgtggccgtcgaggcgt

SEQ ID NO: 42342 - DNA, 478 bp, Oryza sativa
  Clone ID: uC-osroM202016d04b1
gtggtggcacgggaggcgacgactcggccacccggtctctctcccccacctccctcctccgcctcgccgctgcccgagtggccgccggcaaagccgcgcggccacaaggacggcggcggcggggctcctctctcgcgccactcttaggagaccgggggtctctccggagaggcggcggcggtaaaccgccagattcgcgccgcttcggccggatctggcggggcggcgatgggcgacggtggcggggatggagatggcggcggtagtggcggcagcggccgatggcggcggggttggagacgggcggcggtggggtgaacagatccggcggcggcgcgtctggatccggcggtggcgcgacgtccggtggtgtttggagcgtgcggtgccggcagccaacctcgcccgtggctggcgatggtggtgaaaggaggacggccgatttgtgcttaggtctagatccggcgcgttctcagtc

SEQ ID NO: 42343 - DNA, 504 bp, Oryza sativa
  Clone ID: uC-osroM202016d06b1
tctttttcctcctcctccagatccaccctccgccgccctcatttcgcagccgcgggtttggattaccgtgaaatgagctttcttctcctctctgaaaaggtcagtttggtggtggaaagattggattttgattcccccgattcgcttcccctccggaaagattcaaccttgtcagctctccatccctcaacgaggcagtactaggagctatcaatcagctatggcggaggcggtggatgggggcagctgggaggacatgctgaggaggatcctcccgccggggtcccccatcccggaggcgccgccgaatctcgattactccatagccctagagtacgacggcccaccggtggcctatgacctacctagggtggaccccgtcgagatccccacggcggagccggtgtccggcccgcagaggcttgggaacggaggagggttgccggttgtggagcccatcccgctcccagtgtcccggattgcccggtgcgccgagcccgtgtc

SEQ ID NO: 42344 - DNA, 502 bp, Oryza sativa
  unsure (1)..(502): unsure at all n locations
  Clone ID: uC-osroM202016d09b1
ttaaaaccagcggaggcggagcagaaaacagcagccatggaatcatccatccatggccaacgggctccccaaccccctcctcaccgccgacgccgcccgatccctcgtcgactccgtcgacgccttcctcttcgactgcgacggggtgatttggaagggggatcagctaatcgaaggggtccctgagactttggacctcctgcggaaaatgggcaagaaattagtttttgtaacgaacaactctagaaagtcgagaagacagtatgcgaagaagttcagagcacttggacttgaagttacagaggaagagatctttacatcatcatttgcagcagccatgttcttgaagttaaataatttctctccagaaaagaaggtttatgttgtcggtgaggatggtattttggaagagctcagattagcccgttttgaatgtttaggtggccccgaggatggcangaaaaacatattgctggaggcaaacttctacnttgaacatgac

SEQ ID NO: 42345 - DNA, 527 bp, Oryza sativa
  Clone ID: uC-osroM202016d10b1
ttccaggaggaaggcatacaggcatggcgctctcctgcatgaggtgctccccggccgccggcgccgtacgacgaggattggcatcggcggctccgccggcggcgctctcctttgccagatgcggcctccgtagagcggccgcgctcgggtggcgcgtcgccgccgtcgccactacgggagtgcaaggtgccaaggatgctggtctggagaaagctgccagaagtgcttcccaatcaaaggtggaaaatggctcaccttcagaaatcattttagatgattttgaagacttgagccctctatcagaaaatgatgactccactgttagtatcactgtagtcggagcatctggtgaccttgccaagaagaagatatttcctgcactttttgctctatactatgaagattgtcttccaaagcatttcactatcttcggatatgcacgcagcaagatgacagatgctgaattgagaaacatggtcagcaaaacactgacatgcagaatagataaaagggaaaactgtaatgag

SEQ ID NO: 42346 - DNA, 530 bp, Oryza sativa
  Clone ID: uC-osroM202016d11b1
tgttccaatccccaaatcctcctcatctcctgttccagaacctttctttttcgatttcgtgttcgagttctttgtgattgcagcgatggcgtccgtggatctgaccccgaggcaggcgaggaaggcgtacggcggcgatggtgggacctactacgagtggagccccgcagacctgcccatgctggaactcgccaacatcggcggcgccaagctgtcgctcaacgccggtggcctcgccctgcccagcttttccgactccggaaaggttgcgtatgttcttcaaggcaagggcacttgtggcattgtcctgccggaggcgagcaaggagaaggtgatcgccgtgaaggagggagactccctggcactcccctttggcgtggtgacatggtggcataacctcccggagtccccaatcgagctcgtcatcctcttcctcggcgacacatcgaaggcgcacaaggccggccaattcacaaacatgcagctcaccggtgccaccggcatcttcaccggcttctccacggagttcg

SEQ ID NO: 42347 - DNA, 504 bp, Oryza sativa
  unsure (1)..(504): unsure at all n locations
  Clone ID: uC-osroM202016d12b1
tttctgatgaaatgttcgtggaagacaccaaactatggcagaagagggtcgggctctacaagtccgtgataagtcaatttggacagaaaggacggtaccgcaacttgcttgatatgaatgcgcgctttggcggcttcgctgcggcattggtggatgaccctgtgtgggtcatgaatatggtcccaactgttggcaattcaacaactcttggggttatatacgagcgtgggctcatcggaagctaccaagactggtgtgagggcatgtccacgtaccctcggacctacgacctcattcatgccgattcagtgttcacgctatacaaggacagatgccagatggacaacattctgctggaaatggacagaatactgaggcctgagggtacagtgattataagagatgatgttgatatgttggtgaaaataaagagcattaccgacggtatgagatggaacagccaaatcgttgatcacgaagatggcccgctcgntccggagaagc

SEQ ID NO: 42348 - DNA, 523 bp, Oryza sativa
  Clone ID: uC-osroM202016e02b1
tgttaattcttgcggtttctcgccgtccgagcggccgagcggttagcgcctcgatccgcccgccgccgcgcatgaggatcctcgcgctcgtcgtggcggccgcggccctcctcgccgccgccgccaccgcgcacgagcaccacggcgaggcgcccacctgcgccggcggcggcagcgggcgcgtgctcgcggagttccgtccaggggaggtgaccctggacgggcacccggcagactgggacggcgtggaggcgtcggagatcgcgctgcttccggctcttgaccccgacgaggacaaggcctacgccggcggcaaggtcttcgtcaaggctgtgcatgatggcgtcaacattttcttcatgctgaaagttgatggggattacacctacactaaaggcgaaaataaggaagtgccctttctgctggtctgatggttcaaatatggagaggaaagcaccgaactattatatgggagggtggaaagatatgcctggttcatgcacaagcacaagttgcagaggtc

SEQ ID NO: 42349 - DNA, 499 bp, Oryza sativa
  unsure (1)..(499): unsure at all n locations
  Clone ID: uC-osroM202016e04b1
tgcttccttcgtcctcccctccagccgccgaccgaccgatcgcgatggcggcggcgcggctccggctgctgtccgcggggctcctctcgccggcggtgtccagggcgcggcactcttcttccctgcagggtctccgcgcgctgtccacgctctccactacgctcgggtccggcgcgggggaggacgagatcgagcgcatccgccgcgagttcgaggacgccaagcggaactacctcagcatccccgtcgccatcaaggacatggccaagatgaacccgcaaggcatttatgtgaacaagaacgtcaaactggatgacctgcaagtctatggttttgactatgactacacgctgtcccactactccgagcacctgcagtgcttgatctacgatctcgccaagaagcactnggtcaatgagttgaagtatcccgagagctgcttgaagtatgagtatgaccacggctttcccatcaaggggctctattatgacagattaaa

SEQ ID NO: 42350 - DNA, 234 bp, Oryza sativa
  Clone ID: uC-osroM202016e08b1
tctggcgccgccgatggcgccggcggcggaggagaggacatcgtggaggccggggcggaggcgccgccgccgcagagggagcggctggtgccgcacagcgggccactgagcaagaggtccgggatgaggaagagcgcgaggttcgcggagtcggtgtcggcgccgctgtccgcgccgtcggggtggcggcagatcggcgcgccgcccacggacccatactctactacgaggggg

SEQ ID NO: 42351 - DNA, 537 bp, Oryza sativa
  Clone ID: uC-osroM202016e10b1
tttcgtatcaaacatcatcagactgtatacctttgcatctcttaatgaatgcagtattggataacaaaatgctggacagtggaaaaaaaatgtcgtaaccatcttagttgatctcggtgttaaatattcacatttaaattttcacctgtcaatcagtcaatctagctaacacgtgtgaatatgtacatcatgttaacttgcacaaattaaaaaatggatatgaacaagcaggaatggctgcagaataaagaatgagaacaaaccgctactatcagggtgtaggcctgcactagatgatcaatgtacacgcacaaggcattgccaaggtaggtaggtagatagaaataagatgttgctttgctgtatatgaagtcgtcagatttcttttgatccatgcgtccggtgcctgcctagccagtctaggactgtcagtaagctcagcggaatgtagagctgtcgtcacagagatctcatgtaaacagacataactgctttccatagaaatatgctggcagcatgtgaaaattttgcttcttc

SEQ ID NO: 42352 - DNA, 393 bp, Oryza sativa
  Clone ID: uC-osroM202016f01b1
tcaattctcgcggtttctcgccgtccgagcggccaagcggagagcgcctcgatccgcccgccgccgcgcatgaggatcctcgcgctcgtcgtggcggccgcggccctcctcgccgccgccgccaccgcgcacgagcaccacggcgaggcgcccacctgcgccggcggcggcagcgggcgcgtgctcgcggagttccgtccaggggaggtgaccctggacgggcacccggcagactgggacggcgtggaggcgtcggagttcgcgctgcttccggctcttgaccccgacgaggaccaggcctacgccggcggcaaggtctttcgtaaggctgtgcatgatggcgtcaacattttcttcatgctgaaaggtgatggggattacacctacactaag

SEQ ID NO: 42353 - DNA, 504 bp, Oryza sativa
  Clone ID: uC-osroM202016f02b1
ttaattttaaaagccgctgcttagactgaacacaccacacacgagcacgagcacggtgaagtcgagagagagagaagagagatggtcctccccgtcctcgcgcccctcgccggcgccaccgccgtcgccttcctcctcttcaagttcgccaccgtcgatggggatttcacgctggtctcgcgcggggcgccgcggcgggagaaggtggacgggaaggttgtgtggatcactggagccagccgcgggataggggaagttcttgcaatgcaatttgctagtttaggagcaaagctgatactatctgctcggaacaaggaggagcttgagagagtgaaacataacatcatcaacaagcatccaaatagcagagttgaagtattacccatggatttatcatcgggtgaagagtctctgaaagagcatgtacatgaagcagagtcactcttctccatgcaggcgttgactatatgatccataatgcagcatttgagcgttcaaaaagga

SEQ ID NO: 42354 - DNA, 265 bp, Oryza sativa
  Clone ID: uC-osroM202016f03b1
tttaattccgaaaaaaaaaaaaggaaagcagaggaaaacccctagccgcaagcccccccgccgcgagtcgtcttctcatctctcctccgccgccgccgcctgctgctgcatctctcgtcgtcgccggtgagggaagggaggggaggggggagggcgctatggcggacccagggaggtcccgaccacaggccaactccttgccatgacaaacggggcggtggggtgccccgccgcagccgtggggtgcccgaagaccagtgttcaa

SEQ ID NO: 42355 - DNA, 498 bp, Oryza sativa
  unsure (1)..(498): unsure at all n locations
  Clone ID: uC-osroM202016f04b1
tcggtataccgcggcgggggttccgcctcgggcggcggcggcgggggggcgtcgtcggcgtcggcgttcgcgacgcgggtgctgctgctcctcacgctgctgccgatggcgctggccgcgttcgccttcgcgctgcagtggcgcggcgggatgcgcgacccggcgggcgcggcgtggcccgcggagacgcagaggttccccggcatggagaacagcccgctcggatcctcctcctcctcctcgggcgggggcgggggaggcgggtcctacttcgccgtcacctcgtcgcagtcctcctccgcggccgcagactgcgccgagatcctcggccggagcgcggcgtcctcctcgcacggcggcatctcgctctaccgcgggtggggcttcgactccgacgcgggactaacccncaagatctgtatcacgggaagcacatctgcagggttacaccaaattcttccatggttgtactatccacaggtcatcggtgtttcacac

SEQ ID NO: 42356 - DNA, 523 bp, Oryza sativa
  Clone ID: uC-osroM202016f06b1
catcctatcgattttgcagtttagccctcgaagaagcaaggatttcgagcccggtccctaggctcgatccggccgtgtcctttgctccgatcgagcgcgcgaggtctcgtaaggtccatcctgagcttgttgctgtggagtgcgcgattccgcgctcgatttcgtttcttccggcgcagatttcgtgttttttggcctagatttggcttgtgggtgaccgcctaggcgtttctcgcgtgtttcggctttttgtctgggatcgatttgtggctggatttgcttgttcctggctgcggagcttggatcttagcattagaaaccctcagattggggatttcctgccggaggaagctttttggaggagctgcctttgggaggaactcttccagttctgagggtttcggtgtttgttgctcgcctggctcgagaagaagctgggaaatctcgtattttagggcgggttctagtagatttcgtgtagtggagagcataaagtttgtgtggttttggtggtcaagtctgt

SEQ ID NO: 42357 - DNA, 343 bp, Oryza sativa
  Clone ID: uC-osroM202016f07b1
ttgctctctcttcccactgcagtgctgccgcgtgagcgtgaccgcgtcgtcgtccacggcgagctcgacaccatggccgccgccacggagcagccgcagcagatcaccgagatcgagcacgcccacctccccgtgcgtgggctcagcctccacgtcgcgcaggcgggcaaaggggagctcgggacggtggtgttcctgcacgggttcccggagatatggtactcgtggcgccaccagatgctcgccgtcgccgccgtcgggtaccgcgccgtcgcgcccgactggcgcgggtacgggctctccgaccagccgtcggagccggaggcggcggagtacgacgacc

SEQ ID NO: 42358 - DNA, 430 bp, Oryza sativa
  unsure (1)..(430): unsure at all n locations
  Clone ID: uC-osroM202016f08b1
tcgaaccatacccaacaagcgtcaaatcgcgtcaaagccaaaaacctcatacaagtccaggaatctgtaatatattccgagacttttacacgcattccagtcatcactagtgtagcggttgctgcttcttccccggggaggtttatcggatcttgatggagacccatatcggatccgtggacggggcggcggcggcggcggacaacggcgcggtggggtgcccggcgtcggcggtggggtgcccgatgacctcggcgcgccccgcgcccgtgtcggccggcgaggcgtcgctgggacggcacctggcgaggcggctggtgcaagtgggcgtcagcgacgtgttcgccgtgcccggngaccttcaacctcacgctgctcgaccacctgatcgccgagcccgggctgcgcctcgtcggctgctgtaacgagc

SEQ ID NO: 42359 - DNA, 451 bp, Oryza sativa
  Clone ID: uC-osroM202016f10b1
ttatatgtgtacttcatggatcttcttgccaaatcagtcagagatgaactggctggttgcagtgagaagggttatgattatatgtcaatagctgaagcaagacaagtgctgatgttcagctctgacaaagaattgcaccagtacatcgcagaggagcaccctgaatgggagataaaggatggttccgtcttcttccagaaggcgaaggagacccagccctgcaaggagataccatctttgcaggttatcaaccaaacgctcagctatgctagagagctggagcggattgtatgatttgttaatgaatatcgtttgagatcatttgggacggcatgttcatgctatgtacacatcaggtgtcacggttgagatgcgcatgttgcagctttgaacgtttgagatgcccatgttaccttatgatactttttttaaaaatttcatttaatgggct

SEQ ID NO: 42360 - DNA, 439 bp, Oryza sativa
  Clone ID: uC-osroM202016g02b1
gtaatttctactagcatgagtggagagctgaagagagactactagattggcgaggagatcgggcgcggccgcttcggcgtggtccaccgctgcacgtcgcgcgccaccggcgaggccttcgccgtcaagtccgtcgaccgctcgcagctggccgacgacctcgaccgggagctcgcggagctcgagcccaagctggcccagctggccgccgcgggcaacccgggcgtcgtccaggtgcacgccgtgtacgaggacgacgcgtggacgcacatggtcatggacctctgctccggccccgacctgctcgactggatccgcctccgccgtggcgcgcccgtcccggagcccgtcgtcgtcgtcgtcgtcgggcagctcgcggaggcgctcgcgcactgtcaccgccgcggggttcgccaccgcgacgtcaagcccgacaaca

SEQ ID NO: 42361 - DNA, 461 bp, Oryza sativa
  Clone ID: uC-osroM202016g03b1
cctctaccttgactttggcttccccactctctcttcttcttgggaggctgggagctaccagcacaacacaccaaggaagctgaggtgcgttgatttcttgatatcatggccaagaggcacctcttgttggtgacaacttgtttgtgggctctgtcatgtgccttgctgcttcatgcttcctctgatgggttcctgagagtcaacctcaacaagaagagattggacaaggaagatctcactgccgccaagttggcgcagcagggcaaccgtcttctgaagaccggcagttcagacagtgatcctgtccctctggtggactacctcaacacccagtactatggggtgattggcctcggctcaccgccgcagaacttcacggtgatatttgacactggaagcttcaaccctgtggttccttcaacaaaatgctatttttcgatagcatgctaccttcacagcag

SEQ ID NO: 42362 - DNA, 507 bp, Oryza sativa
  unsure (1)..(507): unsure at all n locations
  Clone ID: uC-osroM202016g05b1
ttcgttccccgcaggtgaacatgagtacatcgacgcggtggtcggcgaggaggtgaggctcattgtggaggtggacttccggtcggagttcgaggtggcgcggtcgaccaaggcgtaccgggcggcgctgcaggcgctgccgccgctgttcgtggggacgccggaccgcctcgggcagatcgtggccgtcgtggcggaggcggcgcggcagagcctgaagaagaagggcctgcacttccctccatggcgcaagccggagtacatgcgcgccaagtggctgtccccgcacgtccgctccggcgacaaggccgccgccgccgctaaaactgtgacgtccactacgtcggcgacggcgacgccggtctcggcggcgagcttctccggcgcgttcgagctcctgttcgataggaaacagagcggngagatccccgccgcggagatgatcacggtggtggtgtctccgtcgccgtggcgcccgacggaggaggcgagcaagaagaaagccgc

SEQ ID NO: 42363 - DNA, 460 bp, Oryza sativa
  Clone ID: uC-osroM202016g07b1
ttccactcacacgcattgcagaggagaggcgacaatggaggggaaggaggaggacgtgcggctgggggcgaacaggtactcggagaggcagtcgatagggacggcggcgcagggcgccggggacgacaaggactacaaggagccgccgccggcgccgctgttcgagccaggggagctcaagtcgtggtctttctaccgggccgggatcgccgagttcgtcgccaccttcctcttcctctacatcaccatcctcaccgtgatgggggtctccaagtcctcctccaagtgcgccaccgtcggcatccagggcatcgcctggtccttcggaggcatgatcttcgcgctcgtctactgcaccgctcgcatcttcggaggacacatcaacccagcagttacttttgggctgttcttggccaggaagctgtccctgacccggccatcttctacatagtgatgcaat

SEQ ID NO: 42364 - DNA, 452 bp, Oryza sativa
  Clone ID: uC-osroM202016g09b1
ctttctcaggcagcaagcgtaagcaaggcagaggagagggaaagaacctctctgcagtgctgctgctgctagcttgcagaaaaaaaaaactctcatcttttgcaggaagagacatcactgtttctgcattcgtgtgcatttggattaagctttgcttatccctttttagtggagattgttgagtatatcaggtctatatattggcagctctggttggagatagacactcacactgagccaagatggggagtttgcacaagttcagtgttattctcctcatgttatgttttgctacgttggggagcgctcagtatgtcaagtataatggatccgaagcagcccgtctctgttcgtgtcaaggatctgctcggccggatgactctcgctgagaagattggccagatgacccaaatcgagagggagaatgccacggcggagcagattgccagtac

SEQ ID NO: 42365 - DNA, 247 bp, Oryza sativa
  Clone ID: uC-osroM202016g11b1
tgttcaggaacagacaatactgccggggaagctgcgagagcaaacgacgccgaggcccccacaaatgggggccagaaagcgaaggcgaacaaagccgcacgagacccaggggaccccgccagagcgtgcggccacgacaaacgctaagaaaccaggagccaagacgaattggagccatggagagcgaaaaagcaaccagaattacaaagacccgagccaaccagagcaggaatactcccacaccaag

SEQ ID NO: 42366 - DNA, 454 bp, Oryza sativa
  Clone ID: uC-osroM202016g12b1
ttctcccccaaccgaaaccggaaagaaaccctagacctccgtctccggcgaccctcccctcacctcctcgccgcggctccccccgcctgacctccgcgcgccccccgtcgactcccccccgcgaatccggatcccgcgcgcgcgaggaaggagggggggaggaggagcgggagatggggtcgtcgtccaaggtggtgcggccggaggaggtgctggattcgctcgccaacgacggcaccatcgacgcgctccgcatgaagatcatcgcccagctcaaggccaacgaggatatgaagaaaaatactatgatgatggcggagcaaagcagagttctaaacactcctggagctgagaagaagaccaagagggagctgcctgatgcccttcggcaggaattggaaaatccagcccttgagaaagcttcaagggaagtctgggatctgatactcgagaa

SEQ ID NO: 42367 - DNA, 275 bp, Oryza sativa
  Clone ID: uC-osroM202016h01b1
tttgtctcgctgtggctcgctggacacaacacacacccacacccactcccccactctctctccggttcatgtcctgctgctccccatgtcgcccccactcgagctcgactacataggcctctcgccgccggtgcccgacgccggcgatgccggcgacgacaacgacctgaagggcaccgagctccgcctcggcctgcccggctcccactcgccggaccgctccccggccgccgccacgctcgaccttatccccgctgacaagggcgccaagcgcg

SEQ ID NO: 42368 - DNA, 194 bp, Oryza sativa
  Clone ID: uC-osroM202016h02b1
ttctttttcaacgggaaccagaagaccaccggcgagggattttcgcaatgccatacgcactctgcctaatgatcgcgcccagacatgcgctcttgctctacatcccaccgctccgttatgcagacaatgaaaccaccacatcgccggcaccacggacagtgggcacctggctagtgggcacgcacgaggcggaa

SEQ ID NO: 42369 - DNA, 528 bp, Oryza sativa
  Clone ID: uC-osroM202016h04b1
ctcgccgccggcgcctccttgagaccgtcgagatcgagatagagagagagtgatggggtgggcgacgcggttcctggcggcggtctgcttcttcgcggcgggcgtcgtcttcgccccctacgtcctcctcggcgcccgctccggctccggctccggcggcggcgccgccgcggccgccaaggtggcccacctcctctgcttcgccacctcatggggcgccgccctctgggccaccttcatcggcggcatcatcatgttcaagaatctgccgaggcaccagttcgggaacctgcaggggaagttgttcccggcctacttcatgctcatctccgcctgcgccgccgtctccgtcgccgccttcgcctacctccacccgtggaagacggcgtccaccgtcgagcgctaccagctcggcttcctcctcgccgcccttggcttcgacctctccaacctgctcgtgttcacccccatgaccatcgagatgatgaagaagaggcacacgattgagagggacctgagcattggtga

SEQ ID NO: 42370 - DNA, 411 bp, Oryza sativa
  unsure (1)..(411): unsure at all n locations
  Clone ID: uC-osroM202016h07b1
tttgcgacggcggcagctcggccaccgccgcgggatcgccgccatgccgcactcactctccctcctgctcgcgcccagccgcgcgctctccctctcctccccaccgctccgcctcgccccaacgcacccaccacttcgcctgcaccacgacggcggccacctcctcgtgggcacgacgaggcggcaggctccctcgcctcgccgccgccgtctccatgccgccagggcttccgcgccgtccgccgccgcggcgtcccccgtagggcctgcgggcgagggctgcgaggtggggggcagggcgaggaaggcggcggtgtaccggaacaggttcctggacctggcgcggctgngggccgtggcggaaagcgcggcggaggcgctcttccgcagcgagattcgcccgcggctggc

SEQ ID NO: 42371 - DNA, 512 bp, Oryza sativa
  Clone ID: uC-osroM202016h10b1
ttatgatgctgctcgtgctgttgaggaacttaatggaaagaaaattaatgacaaagaatggtatgttggaagagctcagaagaagtcagaaagagagattgaattgaagagaagatttgagcaaagcatgaaagatgctgctgacaaatatcaaggactgaacttatacatgaagaatttggatgatagcattggggatgaccagctttgtgaattgttctctaactatggcaaaattacttcatgcaagataatgcgtgatgcaaatggtgttagcaaagggtctggatttgttgcattttcaactcgtgaggaagcatctcaagctttaactgaaatgaatggcaaaatgatatctggaaagccattgtatgtcgcatttgcacaacgtaaagaagacaggaaggcgatgttgcaggcacaattttctcaggtgcgccctgtaccgatgacaccttccatggctccacgtcttcccatgtaccctcctatggctcctcttgggcagcaac

SEQ ID NO: 42372 - DNA, 446 bp, Oryza sativa
  unsure (1)..(446): unsure at all n locations
  Clone ID: uC-osroM202016h12b1
ttcagctcgatcaagctagctagctactagctgccactactgcagctgtagtagtatagcatccaatcccacagcctagctagctgtggtgttggtatagtggcttgtgtgtgaaaaacacccgagagacagagagattttcatccatcgatcgatcgccatgccgcctcaggagttgcatggcgatgatcatggccgccaccaccaccaccagacacccgctggcggcggcgggggcggcgccggtgacggtcaccaccgcgacttcagttctccaccttcaaccacttcttcttcttcttcttcttcttcttcttcttcttcttcttcttctaccaattctcccaccgccaccgccgcgtcgtcctcttccaccaacacctccggcgccgccatcgtccaccccactacctcaagtcacccctccgtcgnctccggccaccact

SEQ ID NO: 42373 - DNA, 493 bp, Oryza sativa
  Clone ID: uC-osroM202017a01b1
cccttttcagcaatcgtgcttctatctttaaagatagtcagcctactccaggaatgtggacattcaatctcacttgggctgatattagcagtagcgatttgagacccaagatatcttccccagagagtatatattatcttgtaaggaacccagtgcacaaaaatgcgggaaatttcttcaggttatctgactttctaacatttgctaaggataaagatttgtctggcatcatgatcatcataaagaatgctgtatttatggcaaattcattaggatttgatgttgttgattctgtaaccaaagccttaagtgatgctggctataataatcaaactaccaaagccaaggaggttatgatccagtcagaagatagtgctgttcttgtcaacctgaagcagctggaaaccaaatacaagcttgtctacactctgccatcaactatcggggatgcttctgcttcctcactggtagatgtgaagaaatttgctgatgc

SEQ ID NO: 42374 - DNA, 336 bp, Oryza sativa
  Clone ID: uC-osroM202017a04b1
ctagatcgagagcgccgcccttcattttcttcgtcgccgtaacggaaaattgccgactgaagactctgactaaactgaaagagaggaaacaacgccggaccaaaagagacaccaaaaccctcctatacacagaagaacaacgccttcaagtatgacatcaccctgccttttttgtctgaaaacaccatccagcaccagattacattgcccacctgatccattattactattttggcacgcgattgcaaggacaagataacaactgggcttgtgagccggttcagtacagaggagcacctcagtctaattcaggatctgggatcatgagatcaactt

SEQ ID NO: 42375 - DNA, 448 bp, Oryza sativa
  Clone ID: uC-osroM202017a05b1
gtaaccctaggtgctcattccaccgccatcgcctccggcgaactctgcaccgccccctttcctacatcccaccactattttataagccagcccttcatctcatctggagatctggttctactcatccaggaaagccccaatctttatcatagcaaggaggtcatgtcggaatcggccctcgacaaacatatagtggtgaaaattcccgatcatgttctgccagatgctttcataggagaaagtgttggtaaaggtaaagaagatggagcaaccgtagataacatggacccgtcccgccctttgctagtatcaagaagtctgatttggataaggctgatgagtgggttaaaataaaatatgcttggatggccaagtccttaacaaatgatataatcatgccagaccctacccctcaggttgctctctagtcttcatgtacagaattcag

SEQ ID NO: 42376 - DNA, 441 bp, Oryza sativa
  Clone ID: uC-osroM202017a08b1
gagctagctgcttctacaactgtgcaggtagctaattaatctagcaatcctcccgtagattggaataatggcagatcagaaggtgattctcgccgagccgctgcttccggggaaggaagctgacttcgccgacgacgacgacgtggaggcgcagctcacttcgtaccacaccggcgcctgcttctgcaggacgtgcctcaacctcaccaatgccgtctccggcatcggggtgctgtccatgccgtacgcggtgtcgcagggcgggtggctcagcctgctgctcttcgtcctcgtcggcgccgtgtgctactacaccggcacgctcatcgagcgctgcatgcgcgccgacggctccatcgccagctacccggacatcgtgcagtacgccttcggcgccaccggcaggagagccgtcgcattcttcatgtacgtcgagctcta

SEQ ID NO: 42377 - DNA, 104 bp, Oryza sativa
  Clone ID: uC-osroM202017a10b1
agctataccccggctggccgatccaaattccctttcgacccacgcaacctcatgattttaaaacccactccacacccatcgtgtcggggtttaaaaaaaacacc

SEQ ID NO: 42378 - DNA, 549 bp, Oryza sativa
  Clone ID: uC-osroM202017b01b1
gtctgcatcagcgccgaggacggtctcgactacgtgttcatacagtacgccgacgccatggccaagctcgccgtcgaccaggccgcccgcatgctctacagatacaacctattgatgtttcctgcagacctcacgagaagcttgctgttcagaaaatggtagtcaatttgatggagttgtatttacaaaggatgaggcagaaaaggcctccttacccgaagcctgtgggaatggatcagtttactgctgaatttccctatgagcccactccagaccaaaaccaggcttttatagatgttgacaaagatctgactgaaagggaaaccccaatggacagattgatttgtggagatgttgggtttggtaaaactgaagttgcaatgcgtgctatattcattgttatatctgctggatttcaagctatggttcttgctccaactgtaatactagccaagcaacattatgatgtaatgtctgagcgtttcttccattatcctgatataaggttgccatgtttagtggtggctcagaccaagaaagaaaagatga

SEQ ID NO: 42379 - DNA, 385 bp, Oryza sativa
  Clone ID: uC-osroM202017b03b1
ttttcttttgcagttgcagagcaagaagcagagggggaagaataggaagcagaggaggaggagtccaagaattgaagcaggagaagaggaggtggtggtttgattcaagaagaaggagaagagcaagagcaaggatgttgcgaggagggacgagcttgctggggatcgtcaacttcgtgacgttcctgatctcgatcccgatcctggggggaggaatctggctggcgtcgagggccaactccaccgactgcatccgcttcctgcagtggccgatcatcgccatcgggctcgccgttatggtggtgtccctcatggggttcgcgggggcgtgctaccgccagacgtggctgctgcagctctacctcttcgccatgttcttcatcgt

SEQ ID NO: 42380 - DNA, 411 bp, Oryza sativa
  Clone ID: uC-osroM202017b05b1
gggtttctcctcctctttcctctcctcctccgccccgacgcctcgctagggtttgggcctctccctccgccgccgccgctgccgcgaggagaggagggggggagagcacccagccggcgagccagccatgtcgctgcgcccgagcgagcgggtggaggtgcggcggaaccgctacaaggtggcggtggacgccgaggaggggaggcggcggcgcgaggacaacatggtggagatccgcaagagccgccgcgaggagagcctgctcaagaagcgccgcgaggggctccaggcccaggcccccgtgcccgcctccgccgcaaccggcgtcgataagaagctcgaaagccttcctgctatgattggtggagtttattcggaccataacaaccttcagcttgaggccacaacaca

SEQ ID NO: 42381 - DNA, 261 bp, Oryza sativa
  unsure (1)..(261): unsure at all n locations
  Clone ID: uC-osroM202017b07b1
gatcaagaacgcgagcgcccgccctagggggggggtttttttattttttggggtgttttttttatttttttttttttatttattatttttattttttaattttatgatagttttttatttttttaggggggaaanaaaaagggggggaaaancatagaaaaacaaagaaaaaagggggaaaaaatgaaaaagagaaaacaagggggcaaaaagtaaaaaagggaaaaaaaaggaaagggagagagaggggaaaaaaaagaa

SEQ ID NO: 42382 - DNA, 508 bp, Oryza sativa
  Clone ID: uC-osroM202017b08b1
catgtaaatctagcttgctgtaaacacagttagttcgtaattatcgcatagggccatggggaagtacagtgtgggtctcgtggttttagggttgctggcccttgcgttttcgaccactgtgctggctgaaacacatgttgttggtgactccaacggttgggacttctctgtgtcgtttgatagctgggctgatggaaaggtcttcgctgctggtgacactcttgttttcaactacaaaccgggcgcacacaacgtgctggccgtggacgcgtcgacgtacaggagctgcaaggtgggcagctcggcggactcggtggcggcggcgacggggaccgcgtcgttcctcctcaagaagggcgtcaactactacatctgcggcgtgcccggccactgcgccgccgggatgaaactccgggtcgtcgccaactgatgaaactccggcgacagatcaatcccttaattaattaaaactatgtgggtgtctctgcagcctgaagcagcatatagc

SEQ ID NO: 42383 - DNA, 357 bp, Oryza sativa
  Clone ID: uC-osroM202017b11b1
tggtgacctgaggccggcgttcgacgtgctggacgcggaccgcgacggtcgcatcagccgggaggacctcaagtcgttctacgccagcggcgcggccaccagcgagcggttcgacgacgaggacatcgccgccatgatcgccgcagccgacgtggacaacgacgggttcgtgcagtacgacgagttcgagcgcctgctggggcgcgccgccgcgggggcggggtgccggcccgcgatggaggacgtgctccgggtgatggaccgcgactgggaccgcaaggtggggttcgacgacctcaaggcgtacctcggctgggccgggatgccggcggccgacgaggagatccgcgccatgat

SEQ ID NO: 42384 - DNA, 469 bp, Oryza sativa
  unsure (1)..(469): unsure at all n locations
  Clone ID: uC-osroM202017b12b1
cctcccatggcctcttccatggccgccaccggcgccctctcgccgccggttttatccgccgagaggccgactgtccgcggcggcctcttcttgcccccttcgccggcgacctcccgctctctccgcctccaatccgcccgccgctgcggcatctcgccggcgaccaggaagccacgctccttgcctcgagcagccaaggttgttgtggctgtgaaggctgatcctttgaaggtcatgatagcaggggctccagcatctggaaagggaacgcagtgtgagctcatcaagagcaaatatggtctggtgcacatttctgctggagatttgctaagggcagaaattgctgcaggcagtgagaatgggaagcgagctaaggaatttatggagaagggtcagctggttcctgatgagattgttgataatatggtgaaggaacgccttctgcaaccagatgctcangaaaagggtt

SEQ ID NO: 42385 - DNA, 517 bp, Oryza sativa
  Clone ID: uC-osroM202017c01b1
gcgcatcgcctcactgcccccaccccacgcgctccgacgagctccgatccgccgcccacctcgccgcccgccggcgatgagcaccgcctccggcgacggcggggacggcggcggcggcggggatggcgcctcgtcggccgcggggggcggcgggaggcggatcccgcccgcctcgtccatgccgtgggttcgcaacctccgccgcttcgtcggcacgggcgccggcctcggatccgaggccttgatggaactggaaacaaaaaggatactgcttgagattttcaaggagcgccaacggaagagtatggaagctggtgccattccaagtttttataagaagaaacctgaagatggatccattagcaatagagttcagaaattggcaaagtacaggtttctaaagaaacaatctgaacttctgcttaatgctgatgatcttgatgccatgtgggtttggctcagagaaactggcgtattgatgatgctacacgtgcttgatagatgaattatgaagact

SEQ ID NO: 42386 - DNA, 484 bp, Oryza sativa
  Clone ID: uC-osroM202017c02b1
ctccaactacccacaattggactcatggggagggctccatgctgcgacaggaacaacgtcaagaagggaccttggtcgcctgaggaggatgccaagctcaaggagttcatagagaagcatggcaccggcggcaattggattgctctccctcagaaagcacgattgaggagatgtggcaaaagttgtaggcttagatggctaaattacctgaggcccaatattaagcatggagagttcacagagcatgaagacaggatcatctgcaacatgtttgccagtattgggagcaggtggtctataatcgcgtcgcagctccccggcagaacggacaacgacatcaaaaactactggaacaccaagctcaagaagaagctcctcggctcgagcgccgacgccgcctgcgcgcctgcacggatacagcgtcatcagcagagccaccaccggtcgtctctgctcctgccgaactcgccgtcgctcaatcccg

SEQ ID NO: 42387 - DNA, 517 bp, Oryza sativa
  Clone ID: uC-osroM202017c03b1
ctagatcctaaagatctcgctgcactggaggctacatgtacattcttcagtaaacctgcaaatttcgagccaaactttgctctatcgcttccagaggttgcggcatttgatatgtgccataaaagacccatggttaagctaatggcacagcaggaacgggagcaactgaagcagaggtgtggtggatcttggaagcttgttttcaagtatattgtggctagagaaaggaattactctcggattgtcgccgggccgggccatagtattgttgtcaccacaaagggagatgcatactcatttggggctaattgctggggccagcttggccttggggatactgaagatcggttcaagccatgccttattaggtctttgcaaagcatcaaaatcacacaggctgcagttggatcaaggcagacaatgcttgtgagtgacacaggaagtgtctatgcatttgggaagggtagctttgtgtgggaagagctttctgatgcagctgatcacattaccactccta

SEQ ID NO: 42388 - DNA, 512 bp, Oryza sativa
  Clone ID: uC-osroM202017c04b1
attcacactatatatatatatatattttgcggcttaatttcccttgtttctttatgcttcttgttcatccaagctaagctgagctgagctgagatgggcgagagatgtagaagtagatagaattaagctagctagagaggtagatatatagctgtggtgaggaagtttccagaaggttctagaagatcgccatgggcaacacgtgctgcgtcgctccggctaccaccgatgaggtgggcgcgccgccgcgagatcatcatcacgcggccaagaagtcgccggcgccgtcggcgacgacgacgacggcgacgaggcagaggcatggccaagaacccaagcccaagcccaagcccagggcgagggcgaagcccaacccgtacgactggggcgccgccgcgggtgctgccggcgagaggcggcgccgccgcgtccgcggtgcgcgtgctggagggcgtggtggccgaccacccgcggctgcgcgtcacggacaagtaccagctcggccgcgagct

SEQ ID NO: 42389 - DNA, 540 bp, Oryza sativa
  Clone ID: uC-osroM202017c05b1
cttggtgtagcttgccactttcaccagcaaagtttcatgtctgatctcgacattcagatcccaactgccttcggtatgcatgttgttctcttccctctttgtgatggtctgagtgcctggaatatttgtgctcatcatgttttcctgaacatgtacagatccctttgctgaggccaatgctggagactctggtgcggctgcaggatcaaaggactacgttcatgtacgcatccagcagcgtaatggccgtaagagcctgaccactgtccagggattgaagaaggaattcagctacaacaagatcctcaaagatctcaagaaagagttttgctgcaatggtactgttgtccaggacccagagcttggccaggtgtgtgtaataacccaaatttgtggtgcctgatctgtacgtttttctatctttctgagctagtttttctgatcaatgcttcactctgtaggtcattcaacttcagggtgatcagaggaaagaacgtatcaaatttcttggtcaggtagggatcattctcttgtgcatgc

SEQ ID NO: 42390 - DNA, 462 bp, Oryza sativa
  Clone ID: uC-osroM202017c06b1
gcgttcgtttttgtgtgtgagagaggggagaggccggcggcgatggggaggacgctggacgtgttgctggggcggacgacgaagcagacggcgaggctcaagtcgatgctggggctggcggtgacgcggctcggcgtgctgcgcgggcacaggcaggtgcggtgcgcgcaggcgcgcggcgacgtggagcagctgctccgcctcggccaccccgaccgcgccctgctccgcgccgagcaggtcatccgcgagcagaacacgctcgacgccttcctcatgctcgagtgctactgcaatctcatcaccgagcgcgccgccctcgtggactcgcacagggagtgtcccgaggagctgcgtgaggcggcagcgggtttgatctacgccgcggcgaggtgcggtgacctgccggagctgcaggaggtgaagcgcctcatggcggccaagttcagcagggagttcgtc

SEQ ID NO: 42391 - DNA, 476 bp, Oryza sativa
  unsure (1)..(476): unsure at all n locations
  Clone ID: uC-osroM202017c07b1
caaccgcaaacgaaaaattaaagaagcagagaaaaaagctctcgcggcatggattcgcacgtaggcaagttattcgattcggtgggctcgatcttccgcggcagcgacaccctcccctggtgcgaccgcgacatcatcgctggttgtgagaacgaggttgcggaggctgcgaatgaagaacagaagaatgagagccttatgaggctttcgtgggcgcttgttcactccagacagcctgaggatgtgaaccgcggcattggaatgcttcaagcttctttggacaggtctaccagtccactgcagacaagggagaagctctacttactggctgttggacactacagaactggtgattatacaaggagtcggcagcttttggaaagatgcttagagattcaacctgactggaggcaagctctcactttacaaaggcttgntgaggaccaaaccagaagagacngtatgattggcatggc

SEQ ID NO: 42392 - DNA, 440 bp, Oryza sativa
  Clone ID: uC-osroM202017c08b1
gttcacgtacggcttcgccgccggcgtcgtgtacaccaacgactggctcccggccaaggccacctggtacggccagcccaacggcgccggacccgacgacaacggcggtgcgtgcgggttcaagaacaccaaccagtacccgttcatgtccatgacctcctgcggcaacgagcctctgttccaggacggcaagggctgtggcgcctgctaccagatacggtgcaccaacaacccgtcgtgctccgggcagcccaggacggtgatcatcacggacatgaactactaccccgtggccaggtaccacttcgacctgagcggcacggcgttcggcgccatggcgaggccggggctgaacgaccagctgctgcacgccggcatcatcgacatccagttcaggcgcgtgccgtgctaccaccgcgggctgtacgtgaactgccacg

SEQ ID NO: 42393 - DNA, 555 bp, Oryza sativa
  Clone ID: uC-osroM202017c09b1
gctctcgcttcgacaaacaaaaccccccaaaaccctagcctccgccgcccgccgccgccgccgccgcgcaacccccgagctcgagcggcgcgatgaacatcaagggcggaggccgggtcccggtgcccccggccggcgcgggcacgctcgtcaagctggtggtgctcggcggcacggccgtgtacgccgccgtcaacagcctctacaacgtcgagggtggccaccgcgccatcgtcttcaaccgcatccagggaatcaaggacaaggtataccctgaggggactcactttatgattccatggtttgagaggccaatcatttatgatgtccgtgctcgtcccaatcttgtggagagtacttctggaagcagggatctccagatggtgaaaattggtctccgtgtccttacaaggcccatgccagagaagctaccaactatctacaggactctgggggagaacttcaatgagagagttttgccttcaattatccatgaaacacttaaagctgttgtcgcacaatacaatgcgagtcagctaatcacacagagagaga

SEQ ID NO: 42394 - DNA, 486 bp, Oryza sativa
  Clone ID: uC-osroM202017c10b1
gacagatatgacggccgccctgcaagcgctgctcgacccgacggcgctgtccttgggcctgcccacgccggcgatcaacaaggaggagtacctcgccatctgcctcgccgcgctcgcctgcacgcgggcggggaaggccctggtgggagtgggaggccagcagcaggtgcaggcctgcaataagtggctgtgcccagcgcccgcggcgcctgaggagctccgcttccggtgcaccgtctgcgggaaggccttcgcctcgtaccaggcgctcggcggacacaagtgcagccaccggaagccgccttccccgggagaccactacggcgccgccgccgcggcgcagcagctggcatccgctggtgactcgaaggaggactcggcgtcgtcagcggccgggagcactggcccgcaccggtgcaccatctgcaggaggagcttcgcgactgggcaggcgctcggcggccacaagcgctgccactactggga

SEQ ID NO: 42395 - DNA, 369 bp, Oryza sativa
  Clone ID: uC-osroM202017c11b1
gcgcacacaccactccatttctgagctcttctagtttgagtgagagagcagcagaagggagtagtgcaagatgccgatccgcaacatcgccgtggggagccaccaggaggtgtaccacccgggtgcactcaaggcggcgttggccgagttcatctccaccctcatcttcgtcttcgccggccagggctccggcatggccttcagcaagctgaccggcggcggagcgacgacccccgccgggctgatcgcggcggcggtggcccacgccttcgccctgttcgtggcggtgtccgtcggcgccaacatctgcggcggccacgtgaacccggccgtgaccttcggcgccttcgtcggcggcaacatcaccct

SEQ ID NO: 42396 - DNA, 479 bp, Oryza sativa
  Clone ID: uC-osroM202017c12b1
gcggttacaatcagcacacgctctctgctagtctgagcgctctcgccatcgcacctgtgtctcgtcgaacaatggcctccaccgccgccgcttgctcccctttcgactgcgtcctctttgacctcgacgacacgctgtacccgggaagcgcgggcatcgggctggcgacgaagcgcaacatcgacgagttcctcatggcacggtgcggcgtcacggcggagcgggccgccgcgctccgcgtcgagctcttccgctcctacggcagctcgctcgccggcctcatcgctctcggctatgacgtgcacccggatgagtaccacagctacgtgcacgggaggctgccctacgaccggatcgccgccgacccgcagctcgccggccttctgcggagcatcccgcagcgcaaaattctgttcaccaactctgatcgcgcgcacatgaggaaggcgctgcagcggctgagcgtcgacgagggctgc

SEQ ID NO: 42397 - DNA, 470 bp, Oryza sativa
  Clone ID: uC-osroM202017d01b1
ggtacatcaatgagccgtacaaattctttgatagggggtgataacaagggagccgctgcacgcttcatggaagactgggctgaacaaatgggcttgcccaaacagtcagctcatgcaaattctgatgatttgagatctttgcacaagacatctgtgcttcctcggagagttgctactataattcctgaaccaaatgagataactgatgacttgatacaattggcatcatcctatgaggcctcaggtggcaggcggttggcaggttcaagtatcactaggcgcattagaagtactcaacaaaacaaacctaaatttgtttctgcatttcgtcagtccaatcgtggagatgttagtgcaaatgtgcttggaacattttgcatagacaccaatcttacctgtgacttgaatcacagcacatgtaatgggaaaaatgaactttgctatggactaggcccaggataccctgatga

SEQ ID NO: 42398 - DNA, 409 bp, Oryza sativa
  Clone ID: uC-osroM202017d02b1
ctcctgcacctgctcctgctccccccgatcggatcggcccggctcctcctgctccgccgccgccaccgccgccgcagataggagaagatggccgcacttgataccttcctctttacctcggagtctgtgaacgagggccaccctgacaagctctgcgaccaagtctcagatgctgtgcttgatgcctgcctcgccgaggaccctgacagcaaggtcgcttgtgagacctgcaccaagacaaacatggtcatggtctttggtgagatcaccaccaaggctaacgttgactatgagaagattgtcagggagacatgccgtaacatcggttttgtgtcagctgatgtcggtctcgatgctgaccactgcaaggtgcttgtgaacatcgagcagcagtcccctgacattgcac

SEQ ID NO: 42399 - DNA, 485 bp, Oryza sativa
  Clone ID: uC-osroM202017d03b1
atcacctgctccttcttctcctcttcctccgcgcgcgcgagatccagggagagggagagggagagatcatggcggggacggtgacggtgccgtcggcgtcggtgccgtcgacgccgctgctcaaggacgagctggacatcgtgatcccgacgatccgcaacctggacttcctggagatgtggcggcccttcttccagccctaccacctcatcatcgtgcaggacggcgacccgaccaagaccatccgcgtgcccgagggcttggactacgagctctacaaccgcaacgacatcaaccggatcctcggccccaaggcctgctgcatctgcttcaaggactccgcatgccgctgcttcggctacatggtctccaagaagaagtacgtgttcaccatcgacgacgactgcttcgttgcaaggacccatctggcaaggacatcaatgctcttgagcagcacatcaagaacctgctcagcccgtgcaccc

SEQ ID NO: 42400 - DNA, 501 bp, Oryza sativa
  Clone ID: uC-osroM202017d06b1
gttgattttgcttttctttgctttgctttccagtgggaattttgtgtacgagtacagcacaagctcagctcagctgcttcagctataaaagcttctcactctctcacacacacactctctctctctgctagctcagctctagatccagcaatggcgcctcctccggctgcagctgcggcgttggcggcgtgcattctcgccgtcgccgccaccctcgccggcgccgacgacccctaccgcttcttcacctggaacgtcacctacggcagcatcaacccctgtcggctgcacccccgcagcagggcatcttgatcaatggccagtttcctgggccgcgaatcgactgcgtgacgaacgacaacatcatcgtgaacgtgttcaacaacctggacgagccgttcctcctgacatggaatggcatcaagcagcgcaagaactcgtggcaggacggcgtgctgggcaccaactgcccaatgccccctggcgccaactacacctaca

SEQ ID NO: 42401 - DNA, 437 bp, Oryza sativa
  Clone ID: uC-osroM202017d07b1
cttgtctgtcccgaactgcgccgtcgacgaagtcgtcgccatcctaccgtcggactgcggcgaagcaggcccgatcggggagccaccctacagggcattgcacctgcactcctatgcttccttgcgcgtcgcgcgcgcgcgcgaagctagtctctaggaggggggcgactctagcctgcctgtccccccacacccaagcctggactgggatcaagctgaaccgtgctcgatgatgaataggaggtgcctaaagcagaccacgacatcgtagcctatggctgctcgatgagcagggcaaatgctgctggctgtactaggaggtggctttctctcggcaccggcttcagggcacagccatggccttgcccttgtgcttcttggcaggaaagatgaagagaaccctgtccaggtattcccgtggaatcagtaccgactag

SEQ ID NO: 42402 - DNA, 502 bp, Oryza sativa
  Clone ID: uC-osroM202017d08b1
tcgtccgatccgatctgagccagagccaaccatggcggcgactagggtttggctctccgccctcctcctcgccttcctcctcgccgacgcccccgtcggccaagttgccagagctcagtccgaggaagaagctgctacagctgaagttgttgatggggctgatctaggaatcgtcagtgatgatacacaagtttccagcgatgggcctctaagtccggctcctggtgtggagacagtatgtgtttttcccaaaaacgctggcaaaattgtgctagcaggtgaagaaactgaactactggttggcctgcaaaacgagggtgaatcaactttgaatgttgttgctatccattcaactctccatcttgcttttgaccataagatgtatggacaaaaccttactgttcagaacttcttcaatgcatcagttcctgtctctgtacaagcaacctttgcgtatacattcgccgtgagcaagttctggcagcctggagcatatgatcta

SEQ ID NO: 42403 - DNA, 549 bp, Oryza sativa
  Clone ID: uC-osroM202017d10b1
caaatcctcctctccgccgccgccgcctgcacctgcaccgctcgccccctcgccgcgcctgcactcctcacaccacgctcctgctgacctcctccctcgcgcttctccggcggcgcctcgctcctctgcgcggaccgttgcccctggccgagcgcggcgcggcgcgggccgcccgcggggggatcgggctcgggtagaggcgggcgacctggcgggggaagtaaggggtcgcgcgtggcggggagatgatctacacggcgatagacacgttctacctgacggacgagcagctgcgggactcgccgtcgaggaaggatgggatcgacgaggccaccgagaccgccctccgcgtctacggctgcgacctcatccaggagagcggcatcctcctcaagctaccacaagcagtgatggccacagcacaagtattgtttcatcgtttttactgcaagaaatcatttgttcgggttagcgttaagagagttgctgcaagctgtgtttgggctggcaggaaagtggggagagtccaggagatcaagcatataatca

SEQ ID NO: 42404 - DNA, 521 bp, Oryza sativa
  Clone ID: uC-osroM202017d11b1
tcttgtcaaagaaaccccttctttagagtagcgtgtaactataagtggggttatttgaggctttaaatttttctaaaagtcaacacaaaagttttcttcaacttgtttgtggcttgatattttgtactgaggatattaagaactgcgttagcctcaaagtcttatctagaataaacatgttttacttttgtagtagtttgtggcttgatatgtgaagttgttggcatgtatgcaatagcaatgatgattttactacttataatatttgacttctaatcatattctttgtcttcagggcgaacgcccagcaaccaaagctgttcgtgggtatgatcctcatcctcatttttgccgaagcgcttgctctctatgggctcatcgtcggcatcatcctgtcatcccgcgctggccaatctcgtgcggattaggcatgtttcaacacgcagacccttagtgggttcttggttcatattgctgaaactacaagctgagctctaggggtttattctggcttagtttct

SEQ ID NO: 42405 - DNA, 448 bp, Oryza sativa
  Clone ID: uC-osroM202017d12b1
ttcttcagtatcgaatcctctcttctcctcgtgcccaccaccaccaccgtagcaatggcgggcaacgggccgatcaacaaggaggacccgctcaactggggcgcggcggcggccgagatggccggcagccacctcgacgaggtgaagcgcatggtggcgcagttccgcgagccgctggtcaagatccagggcgccaccctccgcgtcggccaggtggccgccgtcgcccaggccaaggacgccgccggcgtcgccgtcgagctcgacgaggaggcccgcccccgcgtcaaggccagcagcgagtggatcctcaactgcatcgcccacggcggcgacatctacggcgtcaccaccggcttcggcggcacctgccacctggcgaccaaggacggccccgccctccaagtcgagctcctcaagcatctcaacgccggaatcttcggcactg

SEQ ID NO: 42406 - DNA, 365 bp, Oryza sativa
  Clone ID: uC-osroM202017e01b1
cacaccatctccatttctgagctcttctagttggagtgagagagcagcagaagggagtagtgcaagatgccgatccgcaacatcgccgtggggagccaccaggaggtgtaccacccgggtgcactcaaggcggcgttggccgagttcatctccaccctcatcttcgtcttcgccggccagggctccggcatggccttcagcaagctgaccggcggcggagcgacgacccccgccgggctgatcgcggcggcggtggcccacgccttcgccctgttcgtggcggtgtccgtcggcgccaacatctccggcgggcacgtgaacccggccgtgaccttcggcgccttcgtcggcggcaacatcaccct

SEQ ID NO: 42407 - DNA, 322 bp, Oryza sativa
  unsure (1)..(322): unsure at all n locations
  Clone ID: uC-osroM202017e02b1
cagtttctcacgcacacctgacggcgcctgagtgccgacggccaccatatcctcgtacgtcctcctcgagagatatatagcagcgatcgatcgatcttctcttctcgtcttgatcatcaagtagagtgcatggatcgtcggcggcgggggcagccggagcgcaaggcggcggcggcgacgacgaagaagcgcgggagggacgaggaggtggcggcgtnctggcgccgccgccgtcgtgtggcgcggtggatttcccgttcgaggagggggacgaggaggcggcggcagatgacggatgaaggaaacaaccaccgcaagtgct

SEQ ID NO: 42408 - DNA, 464 bp, Oryza sativa
  unsure (1)..(464): unsure at all n locations
  Clone ID: uC-osroM202017e03b1
tgtagatgtgtgaaagttaataccagccgggtcacttcgcttcctgtggcagcacagctagcgcgtggccatggacgaccaccagagcaaggtgcagcggctgtacgacgcgtgcgacgccgtcttctcgtcggggagtaaagcagggttgccgacgctcaagcagatcaggtggctgcaagacctgctcgatggcatggaggcggcggacgtcgggatcgaaggcggcggcagcggcggcgagaggtccgtcgtcctcggaggacgacgacgagaggagcccgccggggcggcggtttctctcggcgcgggcgttcacccggatcacctacgtgcacatccacgagtgcgacgatttctcgatcggcgtgttctgcttcccggccggcgcgacgctgccgctgcacgaaccacccgaaatgggtggtgctgagcaagcttctctacngctcgatgcgggtcaa

SEQ ID NO: 42409 - DNA, 458 bp, Oryza sativa
  Clone ID: uC-osroM202017e04b1
gcgacccactcaccatcccaaggcggcgcgacgacccatctcgccgccgcgaattctctctccggcgaattccaactcgaaccctgcctccgccgactccgctcacgagacctaaaccctccttccctctcctctcgtgtcgttcccaccaccatgctgggcgtcgcgaggaggcgcctcggatccggatgcgcgctggggcaactcatgcaggcgctccgaccggccgccgccgccgccgcggcgaggacctactccgccgccgccaaggagatgactgtgcgtgaagcatcgaattctgcccttgatgaggagatgtctgctgacccttctgttttcttgatgggagaagaggttggagaataccaaggggcatataagatatcgaagggtttgttagacaagtatggccctgatagggttcttgacacaccaatcacagaggctggttttactgg

SEQ ID NO: 42410 - DNA, 445 bp, Oryza sativa
  unsure (1)..(445): unsure at all n locations
  Clone ID: uC-osroM202017e06b1
cttcttcgactgcttcgtcgatgggtgtgacggctgggtgctgatcacgtcgacggggggcaacacggcggagagggacgcgcccgacaacctctcgctggcgttcgagggattcgagacggtgaggagcgccaaggccgccgtcgaggccgcgtgccccgaccaggtctgctgcaccgacgtgctcgccatcgccacgcgcgacgccatcggcctgagcggtgggccattcttcccggtggagctgggcaggctggacggcatgaggtccagcgccagcaacgtcgccggcaagctgccgcagtcgaacaacaccctcagcgagctcgtcgccatcttcaaatccaacggcctcaacatgtctgacatggtcgcgctctcagcggcgcacagcgtcaggctggcgcactgcagcaagttctcggaccggatgtanccgtacaac

SEQ ID NO: 42411 - DNA, 437 bp, Oryza sativa
  Clone ID: uC-osroM202017e07b1
ttcttcttcttcctccttctgatgatcaaccagcataaaggagaggcttctggttgggaggttttgcagttctcttaccctcttctgttcatgaatcatgtgcaatgggtgttggagctgtagaagcatggtgatgattttggtgtgattatgtatatatatatatctctgggtgattggtggtgagtagtatgttcttgctgctgtggtttcttgatactttgcttcagggacaggccatggacagaaggaaccaagctcctccggttgatagctcagcatgcttgtgcagagtggagaggatcggtcgccggcgccgccgcggcgaggctgatgccgagggcgaaagcgtgcgcgcagccgagcctcagggcgtccatccacccgctcaagcccaagagatcgccggggcgcgaccaccgcggcggcggcggcgc

SEQ ID NO: 42412 - DNA, 485 bp, Oryza sativa
  Clone ID: uC-osroM202017e11b1
tgtcaatcccttcatggcttgggaagctcagctgcttggctatcttgaagctcagcaacaattccttctcggggcctataccgccagagctcggtgactgccagagcttggtgtggctggacctgaatagcaatcagctgaatggatcaatacccaaagagctggccaaacagtctgggaagatgaatgttggcctcatagttggacggccttacgtttatcttcgcaacgacgagctgagcagcgagtgccgtggcaaggggagcttgctggagtttaccagcatccgacctgatgacctcagtcggatgccgagcaagaagctgtgcaacttcacaagaatgtatgtggggagcacggagtacaccttcaacaagaatggttcgatgatatttctcgatttgtcatataatcagctggactcggcgattcctggcgagctgggggacatgttctacctcatgatcatgaatcttgggcacaac

SEQ ID NO: 42413 - DNA, 524 bp, Oryza sativa
  Clone ID: uC-osroM202017e12b1
gtcggggagctgcagatcccctgcctactgcgcgtccacgcttcgctgccgtggagattcttgaggaggttggtggtggggatggggatggtcggagcctacgcggatcccttcctgcctccgaagatggccttgtcggcgtacgccgcgccgatgggggagtatggccagccgcagccgcagccggcgccgcgcccgccggcctgcccgtactcgtcttcctcctcctcgcccgcgccggtctccgcgtcgtaccattcttggccttcggcgacgtcagcttcgccggtgagtagcccacctccggtctcctctccgccagagtcgcttccgtcatcgccgccgccggcattgtctccgtcgacgccggacgctcctcccccatctctccctccggctccgccgccgacccacccccgtcgccgacccatggtggggtgcaagcgcctgcccccccgatgacaactgacccggccgacgtgcagccccgtgtgtacccataacccccgccgacggtttccccc

SEQ ID NO: 42414 - DNA, 407 bp, Oryza sativa
  Clone ID: uC-osroM202017f01b1
gctttctgcaataggtcccatgaagccatgattccatcaggagaggcacatcaagacggttgctagtttctgcattcaattcagggaggacaatttgcagggtgccggtgctaatctgaactctgaagggaggagacgtgctggttgcaacctgcaagaggccaagaagcggccgaggcaggcagcaatgagcgggaggtcgaggccgtggccaggggacccgtcgccggcgccttcgcagccgccggtcgtcgccgcagcggcggacgcgggcggcgaggcgtcgacgtcgctcagggacttcggcacgtcgatggacgccatctcgttcgggttcgcggacaccgccatgctcgtctgcatgttcctgctcatggccatcttcgagcacctcatcaagccccacg

SEQ ID NO: 42415 - DNA, 446 bp, Oryza sativa
  Clone ID: uC-osroM202017f03b1
gcgttccaatcccaatctcttctcttcccctctcgttagggttaggtttttattttctctctctcgatttctctcttcgcttccacttcccaaaattctcgagtcaaacctcgtggcgttcggccatggcgacggcggcggtgctcggatcccacgacgccctcgacaaccggatgcatctgggggccttcgccgtgtccccggcgtcgaagccgaggcggaggcggcacagcaaggcgtcgtcgccgccccccaaggtggcggcggtgagctcgccgccggtggttaagtcggcggcgagggtggcgtcgcctcctcccaaggctgcggcggcggcggcggtgcctcaagggcgtcgctcgccggtggcgaggaagcaagggtcgccgacgaaagagttgccgaagcagaggctcgtgatggggaggatcccgatcctcaagcgc

SEQ ID NO: 42416 - DNA, 497 bp, Oryza sativa
  Clone ID: uC-osroM202017f04b1
gccatttcggtaaggtttgctgcgactccgccgcgacgcatcttgcgccgccagccgccgccgccgcgcgcctgctgccccgtcgacctcggctgacgcgcggcgccctcgagctcgcgtcgcgtcgcgtcgtgtccctctcgttgatggaggctccggcaaatagcgtggcagtggctgatgggaacccaaagacagcgacagagactccgcgggtggaggattacaaggacgctgccatgtactatggaacgtacccggcttatctctatggagcctatggtggctggggggagtactccacatacctgagccatgatggtgcagagacaccaactgctggtgcttatggggatatgtactatggctattctccatatggttattcaacttcaggacatgatagtcagatgtatggatctcagcattaccagtaccaaccgacatacaacaaacaacagaataccactggcaagcctgtgcacaatggaaaaact

SEQ ID NO: 42417 - DNA, 531 bp, Oryza sativa
  Clone ID: uC-osroM202017f05b1
cgcctccttcgctgccaccatctccttcgccgccgggcaccatcgccggcggtggccgggttcatgctgtcctgaaggagtggaatgctcgtcggtgattagtaggtcaccagaatatcttctctcctagcctcctgggcttgtttacccaatttatcatcagcttcctgaaatctgaagaaaataaattcggttttactaccaccatgggtgcctgcgtgtcttcaagcaaaaaacggagatcacagaaattgtgctgtatataccggcgttaccgcggaaaagttttgagcaatgcacctatagtacgcgccagtgatgcagggagccgtgctgctcctggagaagttgttcatgtggaggctaaatctgatggctcgaatgtaacatttcatctcacacagttgcagtggcatcatagtgagctagactcagaaaatggaaatgttgtgtgtcaagaagaagcatggttcgactctctcagtattttaggatctgattctgatgaagatttcacagtgttaatggaga

SEQ ID NO: 42418 - DNA, 534 bp, Oryza sativa
  Clone ID: uC-osroM202017f07b1
cataaatacgagccgctcgacggggaaccgccgcgccgcgtccaccacccaccacaagctcgccgccggcgtcgcggacggcggctcatcccggtccggcgtgcgatccggctgactggccggagacctaggagcttggaccccccccccccccccccgcgatctgggcggcccatggtggggtcggtaccgcagggcggcagccgcggcagcgagatctagggttttcggcgcctcgggggtggggagggagcgatggggcgtcggaaggtcgccgcggcggcggctgcgacgccgccgcgtggctcgtcgaaggccgggggcggcgtcatatccgaaatccgtgagaaacacaaattggaactggagaatttgacactaacaaagcatccattcaggacattacgttttttcatgttagctatgttgcaatacttgaaaagattagcaacatatatcctgagtaagggtgctttgtttgttggcctcattgtgttggtgctagctcctggaattttacttgccgttacagat

SEQ ID NO: 42419 - DNA, 408 bp, Oryza sativa
  Clone ID: uC-osroM202017f08b1
gagagactagactagtagtaccaattaatggcggcgctctcctcctgcttactcgccgccgtccgacctcatcctccacctgcacctcgaccgctctccccttccttcatcccctctgccctccgccaccgccaccgcctgagccaagcgccgcccctcgccacctctctcccacgaccacgaccaccatggtgccgcttctccgcctgctcgccgacaccgccacccgacgaccctgacgactacgagctgttggacacgacaggaaattgtgatcctttatgctccgttgatgaagttagctcacagtattttgaagctaactacaagccaaaaaatgatcttcttaaagctttaactataatagcaacagctttggctggggcagctgcaataaaccattcctgg

SEQ ID NO: 42420 - DNA, 499 bp, Oryza sativa
  unsure (1)..(499): unsure at all n locations
  Clone ID: uC-osroM202017f09b1
gttaagggagagatttgctcatcggtatcacagtggctccctttttggcatgaactccaggggcaggagaggtgagtcctctcgacgtggtgacataattggttcaggtcttgatagaaatgctggtgattcttctcgacaaccaactagcaagccaattgaaacggaaggatctcctcttgttgacaaggatgctcttaaagctcttattaggctactccgggttgttcagcctctatacaaaggtcaattgcagaggcttctcttgaacctttgtgctcatagggaaagcagaaagtccttggttcaaattctagtggacatgcttatgcttgatctgcagggctcttctaagaaatcaattgatgcaactgagccaccatttaggctatatgggtgccatgcaaatattacgtactcacgcnctcaatcgacagatggcgtgcctgcattaggtttctcgtcgtgttcttgaactttgacatacttggcaagaaat

SEQ ID NO: 42421 - DNA, 522 bp, Oryza sativa
  Clone ID: uC-osroM202017f12b1
ctcgtcttctccggcgagccaccggcgatgggaagtcgcagcggcggccgccaccgactcttcctccgattcatcgccctctcgtcgctgctcctcatcgccgccggggaggtcatcttcgaggagcgcttcgaagatggttgggagtcccgctgggtgaagtctgattggaaaaggagcgaagggaaagctggaacgttcaaacacacggcaggaagatattctggagatcctgatgacaaaggtatacagacaacgttggacgccaggcattttgctatatcggccaagatccccgaattcagtaacaagggccgtacattggtactccagtattccataaagtttgagcaggatattgaattgggtggtggatatattaaacttatgtctggttatgtcaaccagaagaaatttagtggagacactccatacagcttaatgtttgggccagatatatgcggaactcaaacgaagaagctccatcttatactgtcttatcaagggcagaactaccctatc

SEQ ID NO: 42422 - DNA, 357 bp, Oryza sativa
  Clone ID: uC-osroM202017g02b1
ctcactctcacttccttagctcgcatgtagcagagagtccagacacaggagagcaatggcggcaatgcatgtggatgcttccacaggggtgatgaacactctcctacccaagctctccaagcttcttgaagagtacacaaatatcaaaggcgctgcgcgcaaccaaattaccttcctgagagatgagttgagcagcatgaagcctgtgctagagatgtttgcagatgtagatgatgggctcgatcctctgaagagggaatggcgggacaatgtgcgtgagctggccttcgacatcgaggactacactgattctttcatgatccgtgttagccatgaaagtgatgaactgcctactgg

SEQ ID NO: 42423 - DNA, 512 bp, Oryza sativa
  Clone ID: uC-osroM202017g03b1
ctggtacgcctgccggcacgggcccggcacttactggccggacccacgcggccgctcttttagcgaatggggaagcgacagcagcagggggggctcgtacgcttcgccgtcgccgccgccgtcgttgtcgcggcggccctcatcctgaccgcttaggccaagaagtccggagatgtcacggagcttcagatcggggtgaagtacaagccagagtcatgcaccctgcaagctcacaaaggagacaaaatcaaagtgcattatcgtgggtcactcactgatggatcagtgcttgattctagctatgacagaggtgacccctttgaatttactcttggaaacggccaagtgataaaaggttgggaccaagggttactaggtatgtgtgtcggtgaaaagaggaagctaaagatacctgcaaagatgggttatggggagagaggctccccaccgaagattccaggtggagcaacactaatctttgacacggagcttatcgccgtcaatggaaagac

SEQ ID NO: 42424 - DNA, 523 bp, Oryza sativa
  Clone ID: uC-osroM202017g04b1
cctaactctagcctgcttctcctcctcctccccgccgccgtcgtcgcgagcacagacgacgcagccatgtccgggaggaagaagacgcgagagcccaaggaggagaacgtgacgctcggccccacggtccgcgagggcgagtacgtcttcggcgtcgcgcacatcttcgcgtcgttcaacgacaccttcatccacgtgacggatctgtccggcagggagacgctcgtccgcatcaccggtggcatgaaggtgaaagctgaccgtgatgagtcatccccttatgctgccatgcttgcatcccaggatgttgcacagagatgcaaggagcttggaattactgctctgcacattaagctccgtgctactggtggaaacaagacagaaactcctggtcctggtgctcaatctgcgcttagagctcttgcacgttctggcatgaagattggacgcattgaggatgttactccagtcccaactgacagtacccgcagaaagggtggcagaagaggaaggaggctgtaat

SEQ ID NO: 42425 - DNA, 484 bp, Oryza sativa
  Clone ID: uC-osroM202017g05b1
ctctctttgtcgccgtcgccggaaccctaggccgccggcgccgccgtcgccgtcgccggagccggagtcgtcggagctcccgtcgtcggcgggggaggaggaggatgcagctgcggatctcgccgagcatgcgcagcatcaccatctcgagcagcaatggcgtcgtcgactcgatgaaggtgcgggtggcgccgcagacgcccccgccggcgccgccgctcgcgctgcagggggtggtgacgccgggcgcgggccgccaccggatcatggggagaggacggcgagcccaatctgtgaggctgatcgtgagaagctgaaggacggtgcttttgaggatgtcctgaggagtgcacaggaggggattgttatctccccatgggttgcccttgccatgccgccgaggcccggtgtctgggagtatgtgagggtaaatgtgagcgagctcgctgttgagttgctgacagtcccccggtacttgcagttc

SEQ ID NO: 42426 - DNA, 528 bp, Oryza sativa
  Clone ID: uC-osroM202017g06b1
ctctcctcctcctcgtccccgtcctcaacctcaccgcctccccgccgcagtagcagagtcgcccgccgccgcgcatccgcatggcagctgctcaaggtagcagcgttgtcccatcctctgcgaaagttgactttttaaagctccagaatggcagtgatattcgtggtgttgctgttggtggggtcgaaggcgagcccgtaaatctcactgagcctgttactgaagcaatagcttctgcatttgctgcatggttattaaacaagaagaaagcggatggatggagacgtttaagaatttctgttggacatgattctcgaatttctgcacataaattgcaggatgcagttactcttggaattaccactgcagggcatgatgttttacaatttggattggcttcaacaccagcaatgttcaacagtacacttacagaagatgagataaatcattggcccagtgatggagccataatgataacagcaagtcatcttccatacaaccggaatggtctcaaattttttacaagtg

SEQ ID NO: 42427 - DNA, 531 bp, Oryza sativa
  Clone ID: uC-osroM202017g11b1
gctgacctccgttaaccccgttcgttttatttgcggttacttcgtttcttgggaaggcacttccttcctcttcctaggaaggcttgaggagccaagaggaagaggagagcaatgggggaagctgccggcgaccgcgtcctgagccgcctccacagcgtcagggagcgcatcggcgactccctctccgcccaccccaatgagctcgtcgccgtcttcaccaggctggttaacctcggaaagggaatgcttcaggcccaccagatcattgctgagtacaacaacgcaatctctgaggctgatcgtgagaagctgaaggacggtgcttttgaggatgtcctgaggagtgcacaggaggggattgttatctccccatgggttgcccttgccatccgcccgaggcccggtgtctgggagtatgtgagggtcaatgtgagcgagctcgctgttgagttgctgacagtccccgagtacttgcagttcaaggaacagcttgtggaagaggcaccaacaacactttgtgcttgagctgga

SEQ ID NO: 42428 - DNA, 413 bp, Oryza sativa
  Clone ID: uC-osroM202017h04b1
gcttgggggcaacaaggtaggaggcggcgatgggttcggcgagccgcgcggtgtcgtgcctgtgctgcccgtgcaagtgcctggcgtgcggcctcttcagctgcctctgcagcatcctcatctccctcctcgtcaccctcggcgtgctcgccctcatcttctacctgatcttgcgcccccacatgatcgccgccaccgtcgactccgccgccctcacccagttcaccctctgcaccaactccgccctcgcctacagcctcaccgtcgacctgaccgtgcgcaaccccaacaagcgcgtcggcctctactacgacaacgtcgagtccctcgccctcttcgacggccagcgcttcggctacgcccccctcgactgcttgtaccagtccaccgaggcatgcaccaagctctccccc

SEQ ID NO: 42429 - DNA, 407 bp, Oryza sativa
  Clone ID: uC-osroM202017h05b1
catcgatctccaccacctcacctgcaagtaagcaacccacccacccacacacacacactcgtacggcgctgtactgtacggtacggatcgggctaggagatcgagcagcaatggcgcctctgtactgcggcggcagggtggcggcggcggcggtgctcctggcgctcctcgtggcggtcgaggcgccgccggcgacgacgtgcgcggacgcggcgcgggtgctgctcggcggcgagctgcgggcggcggcggcggcgacgcgagtagaggagcaggatgtgaagacgacgactacgcaagcagcagcagcagctccgccggcgccgcgtcgttcgcgcggtgggtgactggccgtcggcaatgctgcgggggtgaggatcctcggctccgtgccgagccctgggatc

SEQ ID NO: 42430 - DNA, 433 bp, Oryza sativa
  Clone ID: uC-osroM202017h06b1
cttttatcaggaccaacgcatctgcaaggcagcggcgagggcaagaacacacacagactgctactgctcttagctgtgcgaaaaagaacactctaagatatcgcacgacgagacatcacttgtactgcatccgcgtgcatgcggattaagctgtgcttatgcctctttagtggagatgtggtgagtccatcaggccaatatatgcgcagactctgggcggagagagacactcacactagcccaagatggggagtgtgcacaagtacagagatattctcctcatgaaaacgactactacgcatggagagcgctcagtatgctacgtatacggatccgaagcaccccggatgtgttgccgtcaaggatctgctcgggcggatgactctcgctgcgaacatagcccagatgacccacactgagaggaagaatgcca

SEQ ID NO: 42431 - DNA, 506 bp, Oryza sativa
  Clone ID: uC-osroM202017h08b1
tctaccgtctgcttcctccattcctccggcggtagaaccttctagaagctctcctcctcctcccatggcggcgacgatcgtgtccgtcaaggcgcgccagatcttcgacagcaggggcaaccccaccgtcgaggtcgatgtgtgctgctcagatggaacctttgcaagggctgcagttcccagtggtgcatcaactggtgtctatgaagctctcgaattgagggacggtggatctgattacttgggaaagggtgtttccaaggctgtcgacaatgtgaactcggttattgccccagctctgattggcaaggaccctacgtcacaggctgagcttgataacttcatggttcagcagcttgatggaaccaaaaatgagtgggagtggtgcaagcagaagcttggtgctaatgcaatcctggctgtgtcactggccatttgcaaagctggagctatcatcaagaagattcctctgtaccagcacattgccaccttgctggaacaagcac

SEQ ID NO: 42432 - DNA, 284 bp, Oryza sativa
  Clone ID: uC-osroM202017h10b1
tctctcagactaattcagggtagatttgtagcagctgttgagaaagctttgaggcaggtcgatgctccatgcacaattggtgtggttctcatgtacaagcgacacagtactcgacattatgctaatgcttcagttggaacaacagccgagataagacaacttgggaggatggatgatggttcattaaatgttgtagcccgtgggcagcaaagatttcgtctgaagcgtcattggatggatgttgatgggtgggttgggggtgatctttatttgatgcgtagaag

SEQ ID NO: 42433 - DNA, 511 bp, Oryza sativa
  Clone ID: uC-osroM202017h11b1
cgttcccctcgtcgctcttcgcgtcggcaagggcgaccgccatggtcctctcctctgcccaacgcccatcagaggaaagctgagccttggtcttcttccttcatcgagcatgtgcattatctttgctggtgatgatggtcattcggagcaactagctctcctgaacaatgaccatgaagtttcagaagtttgtgttgaagaaatttcagctgataatacaggacgatctttcctcatcaggatttcagaatctaaagttttttactattggtgtgctgagaagtcaaagaaacacgggatggaccttcttgcaaagatgaaaaatctactgcagggaaggccaacactctctgatctcacaggcatctcagattcacgactggatgcttttgccactcatctacacgcttatcttgtcgcatcaagtattggagatgttaaatcgctgggatcacttaatgacttcctgggcgcttcaagcccacaagatcaatatgtacagccctcatca

SEQ ID NO: 42434 - DNA, 540 bp, Oryza sativa
  unsure (1)..(540): unsure at all n locations
  Clone ID: uC-osroM202017h12b1
gcggactaaaccaaagatatccttctcctggatgtggcaccccttaccctcggtatcgagactgtcggtggagtcatgaccaagttgatccccaggaacaccgtcatccccaccaagaagtcccaggtgttcaccacctaccaggatcagcagacaaccgtctccatccaggtctttgagggtgagcgcagcatgaccaaggactgccgtcttctcggcaagttcgacctatctggcattccagcagcaccaaggggcaccccccagattgaggtgaccttcgaggtggacgccaacggcatcctgaacgtgaaggctgaggacaagggcaccggcaagtcggagaagatcacgatcacgaacgagaaggggcgcctgagccaggaggagatcgaccggatggtgcgcgaggcggaggagtttgcggaggaggacaagaaggtgaaggagcggatcgacgcccgcaaccagctcgagacctacgtgtacaacatgaagtacaccgtcggcgacaggacatgctggngacaagctgagagc

SEQ ID NO: 42435 - DNA, 343 bp, Oryza sativa
  Clone ID: uC-osroM202018a02b1
agccttgctaccacgtgttggagatggaggctaatccggtggcgatggaggtggagggggtcgaggcggcggggggcaagccgcggttcaggatgccggtggactccgacctcaaggcgacggagttctggctcttctccttcgcgaggccacacatggcctccttccacatggcgtggttctccttcttctgctgcttcgtgtccacgttcgccgcgccgccgctgctgccgctcatccgcgacaccctcgggctcacggccacggacatcggcaacgccgggatcgcgtccgtgtcgggcgccgtgttcgcgcgtctggccatgggcacggcgtgcgacct

SEQ ID NO: 42436 - DNA, 481 bp, Oryza sativa
  Clone ID: uC-osroM202018a04b1
tcttctcttcttccccacattcttttcgattctcatctctcccacaacaaatcacgccatggatccctacaagcatcggccgtccagcgggagcaattccaccttctggaccaccaactccggcgcccccgtctggaacaacaactccgccctcaccgtcggagagcgaggccctatcctccttgaggactatcatctgattgaaaagcttgcacagtttgacagggagcgtatccctgaacgtgtcgttcatgcaaggggagccagtgccaagggattttttgaggtcactcatgatatttctcacctcacatgtgctgattttctccgtgctcctggtgttcagaccccagttattgttcggttctccacagtcgtgcatgagcgtggaagccctgagacattgaaggatccacgtggttttgctgtcaagttttacactagagagggtaattttgatctttgtgggaacaatatgcct

SEQ ID NO: 42437 - DNA, 514 bp, Oryza sativa
  Clone ID: uC-osroM202018a06b1
gcgcttgttatcgttgaaggaactggaatggctggtgttcctggtactgcatgtgccatatttggagctgacactgatgatggagctaatgttatcatgatatcgcaggctagcaaagaacactccgtatgcttcgctgcaccagaaaaggaagttgctgcagtttctgcagctttgcatgtcaggttccgcgaagcatctatctgcaggcaggctatctaaggccgaagtccttcatacatagatcatccttgatgctgtcggcctgaagatggcattttctcctggggtcagtgcaaccctttttgatgcacttgcaaaggcaaatattaatgtcagggcaatagcataaggttgtagagagtacaacatcactgttgtattgaagcaagaagactgcgtaagggctcttagagctgctcactcaagggtcttcctctacaaaaccacacttgctgtcagaatattggacctgggatgattggtcgtactctccttaacccagctgaggatc

SEQ ID NO: 42438 - DNA, 234 bp, Oryza sativa
  Clone ID: uC-osroM202018a08b1
cccctatctccccgatgtcgtcgccggcgccgtcttcgccatgcaagccgaagatccgacagatcctgtcaattccggtattgtaccccagcgaggacaacaggcagggacctatgctcgactggctgctctcccgcgcagctactgtcaccagacgttgggctgactgcggacactcctatccagatatttgctgaagtgttcgcaaggccgtgctactcgacaagatcctac

SEQ ID NO: 42439 - DNA, 515 bp, Oryza sativa
  Clone ID: uC-osroM202018a09b1
tctttggcagtgcaaaagtcctggtgaaaggggaaccaaatatttcatatatctgtgctagatactacagagccccagaactcatatttggggctacagagtacacgacagctattgatgtgtggtctgctggctgtgttcttgctgaactacttctagggcagcctgtttttcctggtgacagtggcgtcgaccaacttgttgaaattatcaaggtactgggtactccaacaagggaagaaatcaaacatatgaatccgaactacactgagtttaagttcccccaaatcaaagctcacccatggcacaagatctttcataaaagaatgccatctgaagctgtagatcttgtgtctcggcttctgcagtactcaccacaccttcggtgcagtgcattggaggtgttaattcatccattcttcgatgaactacgagatccaaatgctcgcttaccaaatggccgtactcttcccccactattcaatttcaagcctcgtgagctgaaaggagcatca

SEQ ID NO: 42440 - DNA, 508 bp, Oryza sativa
  Clone ID: uC-osroM202018a12b1
gtgttaatggtatcctccgcaagtggatctcccgtgttgatgtctggccattcctggaaacatacactgaggatgttgcaaacgaaattatgagggaaatgcaagccaaacctgatctcatcattggcaattacagtgatggaaaccttgttgccactctgctggctcacaaattaggagttacccagtgtaccattgctcatgccttggagaaaaccaaataccccaactcagacatatacttggacaagtttgacagccagtaccacttctcatgccaattcactgctgatcttatcgccatgaatcacactgatttcatcatcaccagtacattccaagaaattgctggaagcaaggacactgtggggcagtatgaatcacacattgcattcacccttcctgtgctctaccgagttgtgcatggcatagattgttttgatcccaagtcaacattgtctctcctggagctgacatgagtgtctacttcccgtacaccgaggctgac

SEQ ID NO: 42441 - DNA, 510 bp, Oryza sativa
  Clone ID: uC-osroM202018b02b1
gttgccttggctgctttggagagttgggaggagcagcgagagagtgggggttgatggcggcgatggcggcggccgtggcctcgtccccctccccctcccccgcctccacccgcctcctccgcggccaccacccgcccccgtcgtgctcggcgccgtcgctgctccgcctgaccaggtcgtcgcggaggctacggctgcgcgccgcggcggcggcggaggaggccgacgtgctccccgggcctggggccgagggggagatggcgacgggcgggaggctggaggagcaacccgaggggccgatcgggggcagccaggtcgacatcggcgggctcgccttccagggcgacatgggcggaggagggttcgccggcgggagcgggggcgccggggccggcggcggtgacggcaacaagatgctcgaccgcggcatcaacacggccatcgtgctcggcgccagcacctacgccctcaccaagctcttaccgtcgaccacgactactggcatggatg

SEQ ID NO: 42442 - DNA, 449 bp, Oryza sativa
  Clone ID: uC-osroM202018b05b1
atgcgggtttatttatggactggacagtggctaggacgaggcatgctccatagtccttaccttgagatttcagaacacatgctatcggccctagctgcaatccaccaagatgggcatgcctatgctgctgatgatgctgatcctcatcgatgctggcccccaggctggcctagctgcaaagccactcccaaatctgcagctgatgaccaacgagggcggccgtataagaatcatccaggacgacattataaaggcaatcaacaagcatcccaatgctggctggacggctgcactgaatccatactttgcagactatactactgcgcagttcaaacatatccttggagtgaagccaacaccgcatagtgtgctaaatgatgtccctgacaaaacttatccaagaccgctgatgcttccaaaagagtttgatgccaggtctgtatggtcac

SEQ ID NO: 42443 - DNA, 206 bp, Oryza sativa
  Clone ID: uC-osroM202018b08b1
gctcccccgcaaatgcccctgggttgtcttggtgctgctggtgctgcacgaagccactagcgcctcgccacctcgggatcgccttcaagatccgattatgatcttcccgccggtgacaaattcgtccagaccggtcctgggcgtacctgccccacctgaccaggtcgtttcgaaggttttggttctggactgcaggaatataacaa

SEQ ID NO: 42444 - DNA, 529 bp, Oryza sativa
  Clone ID: uC-osroM202018b09b1
ttgagtttctagcactcagatcatgcatgcaggctgtggtcaagcgcaaggcttgaagttctggagttaaagctttcggaatttgatatttgttgctttcagtgtcttcattgctgttctcaggcaatcagatgcaaggaggtttgggtagccctggtgctctgtctcatgcttatgtacaacatcctcctctacgatgtgacataccagacatacgtgggctgttttatgatgatgctaataagttccttatcgctccaactgctgatcggatattatactggaagatagttccatctactccagctggacctccgaactctgatcctgtaaatgatggacctgttttatcagttcgatattccctggatctgaaagccatagggatacaacgatccaatcatgaggttgaatttataaatagggaaacaggacaaacctgtaataaaagtgcagagctgattctgaactatactttgctttttttggacagactgccccacttgtgatgtcataataataaaaacaa

SEQ ID NO: 42445 - DNA, 166 bp, Oryza sativa
  Clone ID: uC-osroM202018b10b1
tctctatcacaaatacctgatgctgccactggtcaaatggcaggagatcttataggcatgacgaccggagctggctacacaccaatgctcaaacacccacagcgggacctccactgtagaacgacgacgctgctcatgacacgaggggcctatacaagtctgtcct

SEQ ID NO: 42446 - DNA, 202 bp, Oryza sativa
  Clone ID: uC-osroM202018b12b1
gagcggccgatttttttttcgattcttatactccaccacaacaggggagtctcatggtaaattactggcataaggcctccagccgtagcatatatacgcaatggaccaccagctatggccctctagccttaaagaacaaattggtcgtaaccgttctagagtgaggctcctattgtacttgaggactatcatagggaacaaa

SEQ ID NO: 42447 - DNA, 498 bp, Oryza sativa
  Clone ID: uC-osroM202018c05b1
cgctgcctctgcgccatcgcccaggccgagtcgctccgctacaagctcctcggtggcctcgccgtcagaagggcgtgctatggtgtgctcaggtttgttatggagagtggtgctaagggctgtgaggttattgtgagtgggaagcttagggctcagcgtgctaaatccatgaagttcaaggacggatacatgatttcttctggttatcctgttaacttgtatattgactctgctgttagacatgttcttctgagacagggtgtgctgggtattaaggtcaagattatgcttgattgggatccgaagggcaagcaaggaccaatgactcctttaccggatcttgttaccatccatgcccctaaggatgaggatgagttttcaaagcctcttacagctgagatcccagttgctgcttaaatagaataagtttaggtgatctgatgcatgcgcttcatgttttttcagctatgtaatgttcattattacattattactagt

SEQ ID NO: 42448 - DNA, 542 bp, Oryza sativa
  Clone ID: uC-osroM202018c07b1
tgctctcctcttctttttctcccttgccgccgccgcctccaccaaatcccctacggtcaccaccactcgttcggcgtcttctccgatggtggactggcggccgacctcgagctccctcggccgaccccggtggagaagctgcagccgctattacatcccttgccatctccatcgccggcttcctcgccattgccggcgccgcctctcttttctgtcgccacaatcgccttctccgaccgccaggccaccagatccggcgaccatggtggcgttgagcagctaggagcagctgggagcgccggtgaagcaagtcaacgatgagattgaggggatttttttttgttttctcttttctattttcaattgagagaagagcggaggagcgcgcgtggcaaatccgtatgagaggccagcgaccgaggagcgtggtactggccggccggcggcagaggagccgggaacggctggcaacgatgagtttctagctatgtttgccacatgtatatcacatatagtgtcatgggaggaatccatcgctgctc

SEQ ID NO: 42449 - DNA, 430 bp, Oryza sativa
  Clone ID: uC-osroM202018c11b1
cttggtcttcgtctttgttttcgtccttgggttgatatccagaatcagtcggtttggtttgtcagcaatggcgaggctagccggcgttgctgctctctcgttggtgctcgtcttgctcggcgccggcgtgccccggccggcggccgccgccgcggcgaagacgcaggtgttcctctccaagctgcccaaagcgctcgtcgtcggcgtctcgcccaagcacggtgaagtcgtgcacgccggcgagaacacggtgacggtgacgtggtcgctgaacacgtcggagccggcgggcgccgacgcggcgttcaagagcgtgaaggtgaagctgtgctacgcgccggcgagccggacggaccgcgggtggcgcaaggcctccgacgacctgcacaaagacaaggcgtgccagttcaaggtcaccgtgcagccgtac

SEQ ID NO: 42450 - DNA, 467 bp, Oryza sativa
  Clone ID: uC-osroM202018d03b1
ctcaagctaagggagagagcagcagcagcaagaggagcacgcggggagctagctagctccgccgccgccgacgagctccggcggctcgccgttatccgctcgctgatcgagccgtgtgcgggtgagaaagaaaaagaaaaaaaaaagatcgcgcctttttggcggcttcttggggtgtgaatccacggtttccccggggtaggatcttgatggggctcgaggaaggcggcgcgatgagggcgctgatgcggcggaagcaggtggactccgaccgggtccgcgccgtcggcggccaccagctcgccaaggagctctccgttacgcagctcgtcgcgattggtgttggttcaacaattggagctggagtatatgttcttgtgggaacagttgctcgggagcatgctgggccggcattgacactttcatttctgatagctggagtggcagctgcactctcagcttttctg

SEQ ID NO: 42451 - DNA, 412 bp, Oryza sativa
  Clone ID: uC-osroM202018d04b1
cgttatgtctcgtcgccgtcgcgggcgccggcttctccgacgtgaacgcgcggtgcgcgtggtgcctgcaacaggcggcgctcgggcggagctgcacggggacggtcctcggcgactcggaggtgggcgccatggcgagctcgtggaggctgctgctgcaggggatcacgtagctggtgttcctgtgcgcgcgtggcgccgacgagtacgttcggtcgccaccgagcccgctggtgctcacggtgcacggcaagccggcgtcgcatcctcagcaggtgcacatttcgatggtgggggagaagaacatgaggatttcatgggtgaccgacgacctgtacgcgccattcgtggtggagtaccgaacgtacccggtgaagatcacggagtttgcgaccggcgaccacaccaggta

SEQ ID NO: 42452 - DNA, 508 bp, Oryza sativa
  Clone ID: uC-osroM202018d06b1
gtttcgtgttcctctctgacctctcctttctctctccctgctcttcggcggccgcctcccccctcccccccttccccaagccgccgccgccgccatggccatgaagggacccggcctcttctccgacattggcaagagggccaaggatctgctcaccaaggactacacctatgaccagaagctgaccgtctccaccgtcagctcctccggagtgggcctcacttccacagctgtgaagaaaggggggctttatactcttgatgtcagctcagtttacaagtacaagagtactctcgtcgatgtcaaagtggacacagaatctaatatctctactactttgactgtgtttgatgtccttccatccacaaagcttgtgacaagtgtcaagctgcctgactacaattctggaaaggtggagatgcaatacttccatgagaatgcaagttttgccactgctgttggcatgaagccatctcctgtggttgaattttctggaacagctggtgct

SEQ ID NO: 42453 - DNA, 445 bp, Oryza sativa
  Clone ID: uC-osroM202018d09b1
gggcgcacagcggcgttcttcaacaggcgacggcatcaagggtcaagggagctgggccccgacggaaagccgtgcatcggcgggcgggagcggcggcaggcaggcaaggcccgaacaactcgccatggccacccgccgccgtgccaccacagccgccggcgtagaccccagagccgtggagcaactcagatgctcactcactcgccacggcgctctcctccgcagtaatggtcgcgcggcgtccacatccctcttcggcgaggcccgcatcaccatccgtaagtccgccgcgaagcccaagccgtccgcctttggcagcccgtggtacggacccaaccgcgtaatccgctccaccgatcggggcaggtgcgtgcggagcccggcgaggagggaggaagatgggggcggcctttgccactagctttctccccgctagccaccaccg

SEQ ID NO: 42454 - DNA, 487 bp, Oryza sativa
  unsure (1)..(487): unsure at all n locations
  Clone ID: uC-osroM202018d10b1
cttctccaatggcgggtgctagccatcacctggtcgtcttcttggcagcgctgctcgcgttgctcccgggaagctcgcagctgcagtactcgcagacatggacgctgttcaagatccagcagatgctgaaccacccgccggtgctgagccactggcgccggaccaccgacttctgcggcggcggcggcacggcggcgccgtcggcggccgtggtgtgctacggcgacacggtgacgcagctgcacatcgccggcgtccgcggcgcgccgccgctcccgatgaacttctccatcggcgcgctcgtcatggcgctgtcgaggctccccgacctcaaggtgctcacgctgtccgggctcgggctctggggccccctgccggacaagatcggccgcctcgccgcgctggagatcgtcaacatgagcggcaactacctctacggcggcgtccccggcgggcttgcccagctcaccggcctncagacgctgat

SEQ ID NO: 42455 - DNA, 497 bp, Oryza sativa
  unsure (1)..(497): unsure at all n locations
  Clone ID: uC-osroM202018e01b1
ctttaatcaactgacgtgatggagaattgtatcattccgtggatcaaaataggcctatcttgttctatgccactgccaaaagagcgaccggaaatgggacaagtttctaccatgattcttgaaatcaagaacgcagcctcacacaggcatgtttgattaagctgagacatggcgggtcctgtttcatttgtagcagaagagtgatttaatagtccttgaggaagtaccgaaatgtacgatattttctagtgtaaaatttggtacctctcggtacctctagtactacttaaaaattttgattacctctcaaggactataaaatttctcatagaagaatacaccaatataacatcacgtggatatttctttatgaatgcagaatggttagtgacattattggaagatttggtggtagcgcttgcatccctactcttgaatgttgaaaccttttatggttcatgctgtgtgacttattncttcatcggctaatatctatg

SEQ ID NO: 42456 - DNA, 468 bp, Oryza sativa
  Clone ID: uC-osroM202018e02b1
cggttcttttgtgctcacctccgggctccggccctcgtaccaggcgaggcgagtgaggcgcgcgccgaaagggcatggcaagcacaatgaagaagaaggtggagtccaagcataacattaaggacatgaagatggcgttgaagcatgatataccacttgaggttctgcaagaaggaatcccaactgttcttcgtggcgcgcctgacaacgaggttcatgctgggagagtcataagagtttctagcgccaccggcttgaaagaggctcttcagcaggcggggccgggagcgcttctcaaggtctaatgtcgtcagctacatacctccgtccgtcgcggctcagatccgtgagatgaccaccactacaagaggaggcaaggaggctcaagaaaagaagccgttcgccagcgtcaccattgccaaggcccagccccagccggacgaccaagagacggccaccggcccgccc

SEQ ID NO: 42457 - DNA, 431 bp, Oryza sativa
  Clone ID: uC-osroM202018e03b1
cacttctgtgactgcgcacggcctcgtctcctccgcttcccgagtccgaccttgccccgagccggagtcgcctcctcctcgcgcgcagcgcacggccggtgccaagcaggttttggaccgagggcggacggacgcgggcacggaacttgctccctccactagcatatgtacctgctgctgcaataggcgggtgccatggccgccggtgagctacaggaagatggaagaggtgccgaagggtggaagaagatgcccaagggcaaattagtccagtagggcattcgggcgaagccatcttcgttgaacgtggtattttaccgaagcctgttttaaggatggtattctagcgaatccattcttttgcaatggtacatatgcaattttctctttggtggggggggggtggaagacagttgacctggagacgggaa

SEQ ID NO: 42458 - DNA, 532 bp, Oryza sativa
  unsure (1)..(532): unsure at all n locations
  Clone ID: uC-osroM202018e05b1
cattattgtcccaacttggcaccgtgatttatgcagggtctgtgaaaacatcccaattgtgctctgtggtaacaaggttgatgtgaagaacaggcaggttaaagcaaagcaggttaccttccataggaagaagaacttgcagtactatgaggtgtcagctaagagcaactacaactttgagaagccattcctgtaccttgccaggaaacttgctggcgatggtaacctccactttgtggaaacacctgctcttgctcctccagatgtcacaattgatctagcagcccagcaacagcacgaggctgaactggcagcggctgcagcccaaccactgccagatgatgacgatgacctgatcgagtagatttgcaatgtgctactttacatcgtcttgcgaggagccctgtttttaagcacaggtatatcctaagagatcttttttgccttggagaaaattttcgnggtgttccaagtttaatatgggagtttttgtcgatatttgaccagttcagacaagtcttgggtattgttg

SEQ ID NO: 42459 - DNA, 544 bp, Oryza sativa
  Clone ID: uC-osroM202018e06b1
catttcttaccacgcgccacccacccccgcaccgcacgccaagatccgaccgccgccgccgccgccgccggagtagggagagggagaggagatggggcggagggcggggtcctacccctactacgtggaggcggcgccgccggtggacgtgaacaagaacacggagtggttcatgtaccccggggtgtggaccacctacatcctcctcctcttcttcgcctggctgctcgacctctccgtctccgcctgctcccccgggatcgcgtggaccgtcgtcaacctcgcccactttgccatcacttatcactttttccattggaagaagggaactccatttgctgctgatgaccaaggcatctacaacagactaacttggtgggaacaaattgataacgggcagcaacttactcgtaataggaagtttttgactgtggtacctgtggtgctgtacctgatcgcgttacacttgaccgactacaaacagccaatgcttttcctcacaccattgcagttctgtactagtggtagcaaactgccaaacatg

SEQ ID NO: 42460 - DNA, 432 bp, Oryza sativa
  Clone ID: uC-osroM202018e11b1
cttggtcttcgtctctgtcttcgtccttgggttgatatccagaatcagtcggtttggtttgtcagcaatggcgaggctagccggcgttgctgctctctcgttggtgctcgtcttgctcggcgccggcgtgccccggccggcggccgccgccgcggcgaagacgcaggtgttcctctccaagctgcccaaagcgctcgtcgtcggcgtctcgcccaagcacggtgaagtcgtgcacgccggcgagaacacggtgacggtgacgtggtcgctgaacacgttggagccggcgggcgccgacgcggcgttcaagagcgtgaaggtgaagctgtgctacgcgccggcgagccggacggaccgcgggtggcgcaaggcctccgacgacctgcacaaggacaaggcgtgcccgttcaaggtcaccgtgcagccgtacgc

SEQ ID NO: 42461 - DNA, 509 bp, Oryza sativa
  Clone ID: uC-osroM202018f02b1
cacatctctttccatttctgagctcttctagtttgagtgagagagcagcagaagggagtagtgcaagatgccgatccgcaacatcgccgtggggagccaccaggaggtgtaccacccgggtgcactcaaggcggcgttggccgagttcatctccaccctcatcttcgtcttcgccggccagggctccggcatggccttcagcaagctgaccggcggcggagcgacgacccccgccgggctgatcgcggcggcggtggcccacgccttcgccctgttcgtggcggtgtccgtcggcgccaacatcttcggcggccacgtgaacccggccgtgacctttggcgcctttgtcggcggcaacatcaccctgttccgcggcctcctctactggattgcccaactcctgggctccaccgtggcgtgctttcttcttcgtttttacaccggcgggctcgtcaccggcaccttctgcctgaccggcgtcttcgtgtgggaggccctggtgctggaga

SEQ ID NO: 42462 - DNA, 487 bp, Oryza sativa
  Clone ID: uC-osroM202018f04b1
tttttctttctcctccttcccgtgcgaactccgggctggtgccgagggggtggacgcgccggtggtgacagcggacgcggtgcggagggccatggcggtggggtggcggccggtgatgctggtggtggtggcggcggtggctgcgtgtcgcggggaggcgctgtcggtgacggtgaccgacacggagtgcatccacgagttcgtgccctacgagggggacaccgtgtcggggaacttcgtggttgtcgaccacgacatcttctggagctccgaccaccccggcatcgacctcacggtaacttcaccaggtggcaacactttgtatacattgaaagggaagtctggtgacaaatttgaatttaaagcttcaaggggtggaatgtacaagttttgctgtcataatccatatggagcacctgaaaccgtttctttctacattcatgttgggcacatacccaacgagcacattttggcataagatgagcac

SEQ ID NO: 42463 - DNA, 539 bp, Oryza sativa
  Clone ID: uC-osroM202018f06b1
cactcacacacactccagtacccccacgctttcggcacattctcctcgcgcgagaggggggaggagaggggaggggggaggagcgagagcggagcgatgggctcgcctgggcatggggatgcggcggaaagggacatcgacgatctcccacggaacgacgccaactacacggcgctgacgccgctctggttcctggagcgcgccgccgtggtccacccggacagggccgccgtcgtgcacggcccggtgaggtacacctgggcggagacctaccgccgctgccgccgcctcgcctccgccctcgcgcagcgatccgtcggccccggctgcacggtcgctgtgattgctccaaatgtcccggcactgtatgaagctcattttggcgttcccatgtctggagcggtggtgaactgcgtaaacatcaggttaaacgccgagacaattgcctttcttcttgaccactcagtggcagaggtcgtcatggtggaccaggaatttttcaccctagctgaagagtcccttgagatacttgccgagaa

SEQ ID NO: 42464 - DNA, 427 bp, Oryza sativa
  Clone ID: uC-osroM202018f07b1
ccacaaaacgcggccgccgcgcgcgtatccgaggctgaggctcctcttcctcttcctcttcctcctcctctcggcggcggcggcggcggcgggtctccatttgctcaagcttgcctgccatgcccatggggacgaggtagcgcttcccttcctgcctgcggtacatactaactaagcagagggcatccctcatatataggctttgcgaaatcaatcaacaagcttggggaggagaagaggaagaggaagaggagatggagcaggggggtgaggccggcaccggcggtgggctgggcaacctgcgcgcgctgctggccatcctccagtggtggggcttcaacgtcaccgtcatcatcatcaacaagtggatcttccagaagctggatttcaaatttcctctgacggtgtcttgtgtccacttcatatg

SEQ ID NO: 42465 - DNA, 457 bp, Oryza sativa
  Clone ID: uC-osroM202018f08b1
gcgtctcaaaacgcggccgacgcgcgcgtatccgaggctgaggctcctcttgctcttgctcttcctcctcctctcggcggcggcggcggcggcgggcctccattagctcatgcttgcctgccatgcccatggggacgaggaagcgctaacctttctgcctgcggtacatactaactaagcagagggcatccctcatatataggctttgcgaaatcaatcaacaagcttggggaggagaagaggaagaggacgaggagatggagcccgggggtgaggcccgcaccggcggtgggctgggcaacctgcgcgcgctgctggccatcctacaggggtggggcgtcaacgtcaccgtgatgatcatcaacaagaggatctgtcagaagctggttatcaaatttcctctgacggaggcttgtgtccacttcatatgctctagaattggggctgatattgcaat

SEQ ID NO: 42466 - DNA, 416 bp, Oryza sativa
  Clone ID: uC-osroM202018g01b1
gagtgagtgagagagagagagagtaattaaggctgggaggataggcagcagcagcagcgagagggaaacgagcgagcgagcttagctggtgcttgcctataggtagctaagcaaaatggggcagaggaggaggtcggggccgcggcgtcagagccagagcgtggtggtggtggtggtcgccgtgttgctggcgacggcgtcctgcgcggcggcgcagctgagccagagctactacgcgtcgacgtgccccaacgtggagacgctcgtccgcggcgccgtcacgcagaagctcaaggagaccttcaacgccgcgcctgggacgctccgcctcttcttccacgactgctttgtcagggggtgcgacgcgtcggtgctgatcgcggggccggacgacgagcacaagcgcggcgcggaca

SEQ ID NO: 42467 - DNA, 531 bp, Oryza sativa
  Clone ID: uC-osroM202018g02b1
caggctttttcttctccctcctctccgcctcctcccatgcacatccgcggccgcgccgatcgcacagctttgtgcggtcggggtggtctcggtgccgatggcgaggaagcagcatatcgccatattcaccacggcgagcctgccatggatgactggaactgccgtcaaccccctcttccgagcggcctacctcgcgaaggccggggactgggaggttacgctggtggttccatggctttcgaagggggaccagctgctggtttatcctaacaagatgaaattcagtgtgcccggggagcaagaaggctatgtgcgacggtggctcgaggagcgaattgggctgctgccgaagtttgagataaaattctatcctggaaagttctcaacggagaaaagaagcattctacctgctggggacatcacccagactgtatctgatgataaagcagacattgcagttcttgaagagccagagcatcttacatggtaccatcatggacgaatgtggaaaaacaaaatcagaaaattata

SEQ ID NO: 42468 - DNA, 487 bp, Oryza sativa
  Clone ID: uC-osroM202018g05b1
aaaaaatatctcctcctcctcctctccgactaaaagcgtcgccgccgccgcgtcgtctccttcctcgcgccttcctctctctctctctcctcgcttccccgcgccgccgccgccgccgcctgagctcggcggcagcagggggacgataggtggtgtggtgctttgctccggcgcagcgtgctgctgatcgcgcgcgcgatgcccgcgtggtggccacggaagtcgaggtcgaaggcgaagggcgtggggaagccccccggggcaggggcggcctccgcggcgtcgtccccgcgcaagtcgctcgacctcgttgacctctccgcctccccctcggtgaccccccgggcgagggagaaggcgcgcagcctcgactcgccgtcggccggcgcgccgcggcatgggggcgggcggtgtggtggggggttcgggaaggtcgggtacaagctccccggcccgtgggtgacgcggggccgggggggcaggggca

SEQ ID NO: 42469 - DNA, 460 bp, Oryza sativa
  Clone ID: uC-osroM202018g09b1
ccagtgccttctgcagtgaatgcctccatttttgaaagttttgttaggcggaacattactgagtctgaaactgatgtccgttccagcattcagcagctggtgaaagatagctatggtttcccagcagatggttgttctgaaatattatatggcaacacctgtcttgcactcttcaacaagcttgccctttgctgcatccaagaccagggcaccttacttttccccttgggcgctaatggtcactatgtctcagcagcaaagtttgtgaatgcaaatacgctgactattccgacaaagttagaatcaggcttcaagattgaaccacgggttctagctgacacacttgagacagtatctaggccatgggtttatatttctggccccacaattaaccctactggtttcctgtacagtgacagtgatattcaagagctcctttctgtttgtggtaaatatggag

SEQ ID NO: 42470 - DNA, 512 bp, Oryza sativa
  Clone ID: uC-osroM202018g10b1
tgttcatgtaagcccaatagacaaacatgttaaagttggtattcttgggaatgctgttgattttcatgacaatgatcctagaaatagcacattagcaagtaatgatgaaaggagaaaaatgatgattgcatttgacatgagatgtgttggctttatcatggcaaagatggttctgagagagctaatggattcttctactttcctaaaattcaagtcattcttgacaaagggagatgacccagcatgtctgcgtgagttccttttacctattctgtgccgaaattctccatccgggaatattggtctgcagatgcttgatcgacaatggggtgctggttggaatcttttggcgttattgctggcaacaaaacctgacaaaaggataagttgtgtggatgcattgaggcaccccttcctttgtggacctaaatggcgcataaatccatcagttgatgtcatacggtggggcttgggttctactgctgtccgcatggctgaagattatatttatg

SEQ ID NO: 42471 - DNA, 518 bp, Oryza sativa
  Clone ID: uC-osroM202018g11b1
taatttctggtattggaatagcagagaacagccttccactagggtgcctgcaattttccccaaagaccaaagaaggatactggtttccaatttgcagccttgcacggagtatgctttccggatcatttcatttactgagtatggtgatctgggccactctgaatgcaagtgttttaccaagagcgtggaaatcattcacaagaacatggaacatggtgcagaaggttgctcatctactgccaagcgggacagcaagagtcgaaatggctggtcatcaggcttccaggtgcaccagctgggtaaagtcctgaggaaagcttgggctgaggagaatggttgccccagtgaggcctgcaaagatgagattgaagattcctgctgtcaaagtgattcagctctacacgataaggatcaagctgcacatgttgtttcccacgagcttgatcttaatgaattctcagtccctgacctaaacgctgaggtggtgatgcctacagagagctttcggaacgagaata

SEQ ID NO: 42472 - DNA, 443 bp, Oryza sativa
  Clone ID: uC-osroM202018g12b1
tttttcttcgcgctctcctctcgccggacctcctgggcggccggcctgccggcgagaacccccgcaacgcgcggcgtggggaagcctcccccctctccctgacccggtcctgatcctaccccgccgcgcggcctcttcctcctcctcctcgccggcgaggagagagtgggtgtttcttgaagcggctttgacctccttccaactggctcccgtctcgggtggggggatcgagttgaaggcgtccgccctcccttgcctcggctgctgcaagcgcgagctcgcttgacccacccccagcgggcggctgggcttcctcccccgcggcggcgcgcgcgcgatgagctgcggcagcgatggcgggtgtagggatggtggtggcagcgaggagttcaagcggccgcggccgagcaaggtcgcggcgggggacttggtggagccggcgc

SEQ ID NO: 42473 - DNA, 400 bp, Oryza sativa
  Clone ID: uC-osroM202018h01b1
gtcttcttcttcgagttgttagctccctccttattcaaccatgggtaaggagaagacgcacatcaacattgtggtcattggccacgtcgactccggcaagtcgaccaccacgggccatctgatctacaagcttggaggtatcgacaagcgtgtgatcgagaggttcgagaaggaagccgctgagatgaacaagaggtccttcaagtacgcgtgggtgctcgacaagctcaaggccgagcgtgagagaggtatcaccattgatatcgccctgtggaagttcgagaccaccaagtactactgcacggtcatcgatgcccctggtcaccgtgacttcatcaagaacatgatcacgggtacctcccaggctgactgtgccgtgctcatcattgactccaccact

SEQ ID NO: 42474 - DNA, 420 bp, Oryza sativa
  Clone ID: uC-osroM202018h04b1
cggtcgcgtgggctctcccgcaccaagccgcctgagccctagccgccgccgccgccgcgcgccaccaccgccgcaaccatggccgccgcgctcacccgcccgccgccaggcacggtccagtgcttcgggcgcaagaagacggcggtggccgtctcctactgcaagccggggcgcgggctgatcaaggtgaacggcgtcccgatcgagctgatcaggccggagatgctccgcctcaaggcgttcgagcccatcctgctcgcggggaggtcacgcttcaaggacatcgacatgaggatccgcgtccgcggcggagggaagacgtcgcagatctacgcgatccgccaggccatcgccaaggccctcgtcgcctactaccagaagtacgtcgacgaggcatccaagaaggaggtcaaggacatc

SEQ ID NO: 42475 - DNA, 450 bp, Oryza sativa
  Clone ID: uC-osroM202018h06b1
ccttgcttttatccttctctctcgcgcctcggtgtcgtcgacggcagcgtgaggaggccacggggcacaggatggagcacgcatgggctagcgagaccgcgaggtcgtcttaggtcgtcgtccccgtctcccccgagctgccccgttgtcgcttcttcctgtgagctctgttctttgacccaacaactatttggggtttagtctgtggcaagtgttctgctccaaatcactcgagagattggtgtccatctgtaggtatgattgactgatttatgccctggattgagagagtaatatgtaattaggtgctttcttggtcatttttttcctggggatttaactggcatccgtagatttcttggatttgggattgatttactgcttgattcgaagctctgtttcgttatataatggcgagaacttgaactccatctattaagacattttttt

SEQ ID NO: 42476 - DNA, 530 bp, Oryza sativa
  Clone ID: uC-osroM202018h08b1
tttttccaaggaaacacacactgtggcaagctacatctgatttcacaggtggccaagcaagtatgaacaggaggcattttctacagtgcccttcaagcttgttgagcaaaaactttgaaaagcttctccagtgtgatcagcggctaaaccaattgagtcagcaaccagacatcatattggactctcccgtttttgaacccagatgctctatatttgaggacccagttgaatcgaagtgccaaggttttactaatttgaaggacgaacatgaattatctgggttttcaggttctctgtcaccctgtgctggttcatccatgtctgctaagattgaagtcaatgattccattgcaacgcaagcaggatttcttgctcagccaggaaacccaggacctagtgcagtgaacgttcagggagtcagcagaaacgtaaatggtgcttcagagttaaatatccccagctggtggagtcaactgaaagtgcctgggcttagaccgtctatgtcagtggatgttttggtaaccacttgg

SEQ ID NO: 42477 - DNA, 420 bp, Oryza sativa
  Clone ID: uC-osroM202018h10b1
acgggcccggactgactggctggatcgacgcatgcgtgttgtttttgctgtcccacaccaagccatctgagcggtagtcttcgtcgccgtcgcgcgccaccaccgtggcaaccatggccgatgcgctgacccgccctgtggcaggcacgggccactgcttctggcgcaagaagacggcggtggccgtttcctactgcaagccgggacgcgttctgatcaaggtgaagggagtcctgatcgagctgatcaggccggacatgctccgccttaaggcgttcgagcccatcctgctgggggggaggtcacgcttcacggacatggacatgaggatccccgttcgtggcggagggaagacgttctagatctacgcgattcgtctggccattgccaaggcccctcgttgcctactaccataagtac

SEQ ID NO: 42478 - DNA, 392 bp, Oryza sativa
  Clone ID: uC-osroM202018h12b1
tttctttatgcgccctgcgccgccgccacctcttccttctttgcccaagagcgatggccgcctcccccgccgccggggccgcggccgccaccgtctcgtcgttcgtctcgccgtcgttcttctcctctgacaaggcatcgaagcccgaccgtcttcgtacggagaggagggcggctgccgtcaacgtccgatgcgtcagtagccctccggccaccgaaacttatttcaagacgaaagtaccactaaatgccaatatggccaagctgcaagctggctatctgtttcctgagattgccaggagaagggcagctcactctgctgaagtttcctgatgcgaagattataagccttgggatcggtgacactacagagcccattccagacgtcataac

SEQ ID NO: 42479 - DNA, 339 bp, Oryza sativa
  Clone ID: uC-osroM202019a01b1
ttgtggttatgtttcttactaacaccgtgattttgggaagggggtgggaggaactcttgctggtgatggagccgctcattttgcgtggccagatatgccagtgttgccatttgtgtggctcaatggaataatggggtattctcctgtacagagatacatatagtccaagataaaatgtacaatttcaccgtatgtgtttcgtacttttcagcgagccgactagtgatgggaggataatggatgccacttacctggtggtgttttcttgtgttttgttattagtatctaaaaagtctgtaaattatttattcatattattgttacagagcccttctaatt

SEQ ID NO: 42480 - DNA, 341 bp, Oryza sativa
  Clone ID: uC-osroM202019a02b1
ttttagttgaagctctcgcgcgcggcgcgggcatgaaggcgtcgtcgccgtcgcaagggcagagcccgaggacgccgttgccgcgcgccaccttcggcatcggcgagcacacgcggtcctactccgagccgtggcttactggaacaaagttggcgagcacctgcaacgactcgtgcgtcaacgacgtcgagaacttttcgcgcaccgtttccggcgccaagtctacgcagctggtgggcttgtcatcagcgttgcaccccaagatgctcgcgtccgtgctgtcccactacgccgtcaagtggcttcccaacgtggtggccgtgtcgcttttgtccttgtcg

SEQ ID NO: 42481 - DNA, 436 bp, Oryza sativa
  Clone ID: uC-osroM202019a04b1
tagagtagagaaggagaggagcggagcgccatcagccgtccgatcgagtgatccgatggctctcgctctctccacctctgctgctgctgccgctgccgccgcggcgcgggcgctcgcggcgagggtgacgacaacgaggggttacgccgcgtcggcggcgtcgtcggcgatgaggccgacggcggcggcggtggaagggaagggcgctgcggagatgacgcaggcgaaggacggtgtcgtcgtcgtccgcggagagggaggagtcgagggtgcccgaccccgtgacggtccactaccgaacctacaagcttcgccggcggcgccgacgccgacgacctactctccgaacacctgtgccgcagctacgccggtgcgtgatgcgcgcgacctcacctactgtacgaccgacgacgacgccatccatccatatatatct

SEQ ID NO: 42482 - DNA, 434 bp, Oryza sativa
  Clone ID: uC-osroM202019a05b1
ggtgggcgtgggctacttcgtcgactcgtgccgcgcctgcgacagctgcggcaaggggtacgagaactactgcccgacgatggtgatcacgtcgaacggcacggactacggcggcgccaccacccagggcggcttctccgacgtcatggtcgtgaggcaggactacgtggtgcgcgtcccggcgagcctgccgccggacggcgcggcgccgctgctgtgcgccggcgtgacggtgtacagcccgatggtggagtacggcctgaacggtcccgggaagcacctcggcgtggtcggcctcggcgggctgggccacctgggtgtcaagttcggcaaggcgttcgggatgaaggtgacagatgatagactcgtcgccggcgaagcggggggaggcgctggggctgctcggcgccgacgcgttcctgtcgagccgcgac

SEQ ID NO: 42483 - DNA, 504 bp, Oryza sativa
  Clone ID: uC-osroM202019a09b1
cctcctctccacagcctcctcccgtcctctgcgctttcctccctctccacacctcccctttcctcccctccccacccaccacgatgcccaccagcggctgggcagaggggtggcgcaggcagcggggcgacgcaagcgaccaggcgagcggtcgggaggaggatgtgcaggcgacgcaagggacaagcgcaggtggccgacggcggaagcggcgcgggcgcaggtggccgatgccgggagcggcacgggctcagttggccgacggtggtcggacagtgaaggtagccaccggaaaacaagaaaggcacagcagattcaagcatgaaacttttgaagataatggattacccggccaggcagtcaagcgaagaaagaaaaagttgctcagtgcttcgatgctgccagcctgccactggccaccgctatgcccggcggccggcgtcggaggaagtgcctcacgcagtcacgcggcaaggccgcaacagttctggctcgaggttggcg

SEQ ID NO: 42484 - DNA, 386 bp, Oryza sativa
  unsure (1)..(386): unsure at all n locations
  Clone ID: uC-osroM202019a12b1
cgcagatcgtctttttcagagcattgaaagtacatataggaactgcttatcaaatacaagtgatgtcaaagagcttatacctgagttcttttatatgcccgagtttcttgaaaattcaaattcctatcaccttggtgtaaagcaggatggtgaacctttaggcaatgttggtctccctccatgggcaaagggttgtccagaagaattcattcatatcaaccgcgaagctcttgaaagtgaatatgtaagctctaatctccatcactggattgacctcatatttggttataaacagcgcggcaagcctggctgttgaggcggcaaacatattttactatttgacatacnagggtgcagttgatttggaaaacatgatgatatgttgc

SEQ ID NO: 42485 - DNA, 410 bp, Oryza sativa
  unsure (1)..(410): unsure at all n locations
  Clone ID: uC-osroM202019b01b1
ctctttttcttctccttagttgatttcatcttcagttgcttgagcttaattacagactgagagaagatgtcttgcagctgtggatctagctgcagctgcggctcaaactgctcctgcggaaagaagtaccctgacctggaagagaagagcagcagcaccaaggccaccgtcgtgctgggtgtggcgccggagaagaaggcgcagcagtttgaggcggccgcagagtccggcgagaccgcccatggctgcagctgcggttccagctgcaggtgcaacccttgcaactgttaagatgcctgcctgcatctaccatctatgtgaattgtgatgcagaaaaataaagaagcttggccatttggggtggtgcttgaccaatatatatngtgtgtgtgtgtgcccgtgaaggggtt

SEQ ID NO: 42486 - DNA, 459 bp, Oryza sativa
  Clone ID: uC-osroM202019b02b1
ctcccctgcattccgcgccggagctgaggagggacagcgagccagcgagggaggtggggcaatccagcgagcgccagatcgtgccgccagccccgctccgtcctctctccggcgaccctccgccccgcctgatcccgtggtggatcaactacaactcatctttaggaaagcctcttgaacattagccttgtgtgcctttcaacagtatggcctcggtaggtgtggtgcgttcttccttggggtttcagaacgaaacaagtacaagtggcgatgccgaccgacttccgaatgagatgagcaatatgagtataagggatgataataaggacattgacgacatagttgtcaatggcaatgggacagaacctggtcatgttattgtgacaagcattgatggaagaaatggacaggctaaacagaccattagctacatggccgagcgtgtcgtaggtcatggat

SEQ ID NO: 42487 - DNA, 495 bp, Oryza sativa
  unsure (1)..(495): unsure at all n locations
  Clone ID: uC-osroM202019b04b1
ctcgcgctttgcggcaactggcggtgtctcctagcccttgcctgccatggtgtcgctagccggctcccagatcccgtcgccggggcagagtccgtgcgcggcggcgcggtcgcagcgccgcggcgcggggtactccatgcggaccatccggtcggcgctgctgcagccggactcctgcccgggctcgcctcatgtggcggccgcgtacgacgcggcgggggcggactcggacatggagaacttgacggactccgtgattgatttccatctcagcgagctggcggccaccgcggggcccgcgcaccccgcggcggtggccaagtccgtcgtcggccaacgcggcggccacggagatgctcgagctctcgcgggacttcagtgactactcgagcttcaactcggatatctccggcgagctcgagcggctcgcggcggcgcgcgcnggtggtgacccccaatccgaccgcggcagtggcgccggggatctgatgagct

SEQ ID NO: 42488 - DNA, 519 bp, Oryza sativa
  unsure (1)..(519): unsure at all n locations
  Clone ID: uC-osroM202019b06b1
tggaggatgtttgcccaatctgtcttgaagaatatgatgcagaaaatcctcgctctttaactaaatgtgagcatcatttccatctttgttgcatacttgaatggatggagcgaagtgatacctgcccagtttgtgaccagattactttgatagatgatatgtatgaatagcattggagcatgggactattatgtttggtttgatgctagtttgttttaatgaggaagtacagtcagcaaagctcctgatctatcaacctggtcagacgggggtgctattggaatgaattttgagaaaactaagggaaaataattgaagacgggaatggcttgaaatttgttaaatatcatctcagctttttacattttgtttgaagcattaactgttcatgacaacaggaggatttgttagtatccatatctactgctggttcgattgcttcacagntgatgaaacccccagatgagctttctgtttctttggagttttgaactggggatggtcttcatttcatttctg

SEQ ID NO: 42489 - DNA, 518 bp, Oryza sativa
  Clone ID: uC-osroM202019b09b1
tgtatagacatcattggcgatctaccgcccaatgtcatcgtgcatgatatgagcttcgactggacaggacgccgacttgcagccgtgtgtagtgacaagaccattcgcactttcatcaagcggggcgagaaatggatgaaggaggaagtgctcaccatccagggagctgccgcttggaaggtgaagtgggcgagaccggagttcggcactatcatcgctacttgctcgctggacacacagattcgcatttacgaactaaagaaagtggacaagggagagggagagaagagctcctgggtgtctgtccacaacattcaatagaacaaggctatttaggacatcaagtttatccccagcaagatctatgggctctgcctcgccatcgtctcatctgatggatacctcaaagtgcttatggctgaagatcccctcaagctaaggagtggggcaatcactacagtctacatgttagcgagctagggctaagctgcctctccttgagcaaaaacttggtgaag

SEQ ID NO: 42490 - DNA, 364 bp, Oryza sativa
  Clone ID: uC-osroM202019b12b1
ctcacctgcttgtttgttcgtctctccctccctccctccgactcgcaccgcacccaggccccagcccacgcggggttcggattccctccgccgccacccgcgagagggagacgccggcgccggcgatcggtgaccgatggcggcggcggcggtgcgggtagacaaggccacgagcgagctgctgctcggccccgactggaccctcaacatcgacatctgcgacgccgtcaactccgatcacgggcaagcaaaagaggtgattaaagctctgaagaagcgtctccagcacaaaaattcaaaggttcagttttttgctttgacgctattggaaactctaatgaagaattgtggggattcatgtgca

SEQ ID NO: 42491 - DNA, 450 bp, Oryza sativa
  Clone ID: uC-osroM202019c04b1
tctcctactcagtgcacaacagaatgctagtggggtgccccaacagtttttagatgcaaaggaagctgagattcagcagaaaaaggcagaggaaagtagaattgctcaggagatccagaagaaacgggagaaagatggaagggagcaggaactagagaaacaaaaattgatggacggggatgccggtaattctagattaggtcctgatcgtgctgatgctgaggaggaaaaagaactggattctaagcatagctcaagaacaaagagccgggaaagccttaggtccaggagcatctccttgtcgcctcgcggtaggcggcgatctgattctcctaggaggcgttctgcatctacttccagaaattccatttcttttgggagacaagaacgatcttcaaggcgctcagtttcactaagcgttctttttcttcacaaagcgctctcaagaag

SEQ ID NO: 42492 - DNA, 593 bp, Oryza sativa
  Clone ID: uC-osroM202019c06b1
tttcctatcttccacggcatcgccacccactgctccttctccgtctgctgatgaggagggaggtttctttttatttctcatttttatttttttttttttattattttttatttttttttattttttttgttctttctttttcttttttattttatatttttttttttttaattttaattttttattttatttttttctttttttttttatttttttatttttaatattaattttttatttttttttacttttatattttgttttttacaatattttatttattttttaatttatattttaatttttcttttttatttattttttattcttttttttattcctattgatttttttaatattttaattttttttttatattttttttttttcattttttattttattatttttattctaaatttttttttttattctttatttttctttctatatttttttttattctattttatttttatttttactttttttaattatatcctcttttttaattatttttattaattatatatcttattcatttttatttttttttattttctttttttcttattttattcctttttttttta

SEQ ID NO: 42493 - DNA, 365 bp, Oryza sativa
  Clone ID: uC-osroM202019c08b1
tcgggctaggctttcctcaatttgtgggtcggtcgtagcgttgctggtcgctctgttctcactgtcggcactggagctgctcgctctggacctgtccttccaatagatcggttgtcgcatgctgccatcacactgtacaatgttgatctacaggatgcatgtgatgcctttatgtgacgaacaccacatgcactggaagggcacacatgatcacatagaggaacgatatctgcttactgtcagttgcgaaaggctacccacaactgtagtgggggacataacactggagagggctgctgtgcctctccgttcagtacagctgctacagactgcacaaccagtgctaccgaagcggtgaccggtac

SEQ ID NO: 42494 - DNA, 522 bp, Oryza sativa
  unsure (1)..(522): unsure at all n locations
  Clone ID: uC-osroM202019c09b1
tagaaaggcgtcttcgtactcgcctctctccgcgccctcctccgccgccgctcgccgccgttcgtctccgccgccaccgccgccgccatgagggagtgcatctcgatccacatcgggcaggccggtatccaggtcgggaacgcgtgctgggagctctattgcctcgagcatggcatccagcctgatggacagatgcccggtgacaagaccgttgggggaggtgatgatgcttttaacaccttcttcagtgagactggtgctgggaagcatgtcccccgtgctgtcttcgtcgatcttgagcctaccgtgattgatgaggtgaggactggtgactaccgccagctcttccaccctgagcagctcatcagtggcaaggaggatgcagccaacaactttgcccgtggtcactacaccattggcaggagattgttgatctgtgccttgaccgcatcangaagcttgccgacaactgcactggtcttcagggctttcttgtgtcaacgcttgtggaggagggacggg

SEQ ID NO: 42495 - DNA, 473 bp, Oryza sativa
  Clone ID: uC-osroM202019c11b1
tgaccatcaagaccaacgtggttgggacactgaacatgcttggattggccaagaggattggggcaaaatttctcctcaccagcaccagtgaggtatatggagatcccctccagcaccctcaggtggagacttactggggcaatgtcaaccccattggtgttagaagctgctatgatgagggcaagcgcacagctgaaacgttgaccatggattaccaccgtggtgccaaccttgaggtgaggattgctcggatttttaacacatatggtcctcgcatgtgcattgatgatggccgtgttgtcagcaactttgttgctcaggcactgaggaaggaacctttgactgtctatggtgatggcaagcagactaggagctttcaatatgtctctgatttggtggaagggttgatgagcttgatggaaggggagcacataggaccatttaaccctgggtatcccggtgagttcaccatg

SEQ ID NO: 42496 - DNA, 517 bp, Oryza sativa
  unsure (1)..(517): unsure at all n locations
  Clone ID: uC-osroM202019c12b1
gtgagatcgagggagctaattaatcaactagctagcttgcacaaattaatggcgtccaacaaggctttcgttgtgttcactctcctgatgctggtggctgcatctgccgtcgtcgacgtcgcctctgccggtgatgatcactatctacactacatatatacatatgcatttataattcagtttaattataacatcaaggaatatataattaatcgatcgatactcattaatacttcccccatcctaaaatataaagaattttagatagatgtgtgatacattctagtacaatgaatctagatatactgtatatccagatccattgtactaagatgtgtcacatccatccaaaatctcttatattatcatatgaggggaggtacgtatatctttcgtgttcgatatcagcttctacttgcattgcttaacacctgctgacgattgtgtttttgtttggtcttcttacgagctngcatanattaacgaatatatatatataggagtatatcccatataa

SEQ ID NO: 42497 - DNA, 534 bp, Oryza sativa
  Clone ID: uC-osroM202019d02b1
gcaagatcaattggcgaacggcgacggcggcggcgacctggtggccagttggcaccttgtcgatttccttccaacctaccttccttctccctctatcttctccatcttccaccacttgtatcccttagttcatcctccttccacctctatttactggagtatggttgctattgtattggatgcttgcatatttgagtggaattgagatcagaggttggagttcctaacacaccgccaatgttcggccctgcgacatgaaaggtaggtttcctccaagaccagcagcaacggtgtataggctacacagatctacagccatgccatgctgagtcaggtccgatctacagccatgccatgcggaatcagggtgccgttgctctcctggtttggagatgtacagggaaaatggaaatggtacaggtatttcatattggcctacgaggtaatatttcttcactcggtaatctgttcaggcaatgaaaagttgtgcaatctcctgactctttcaggacatcgacataactactacatggg

SEQ ID NO: 42498 - DNA, 494 bp, Oryza sativa
  unsure (1)..(494): unsure at all n locations
  Clone ID: uC-osroM202019d04b1
ccaaattccccgatccccgcagccgctcctgcgactcgtaggtctcgtcaagtcggcggcgacgactttgatctctattcaagatgcagatctttgtgaagactctcactggcaagaccataacccttgaggttgagtcctcggataccattgacaatgtaaaggccaagatccaggacaaggagggaatcccaccggaccagcagcgtctcatcttcgctggcaagcagcttgaagatgggcgcacgcttgctgactacaacatccagaaggaatccaccctccaccttgtcctccgcctccggggaggcatgcaaatctttgtcaagaccttgactggcaagactatcacccttgaggttgagtcttctgatactattgacaacgttaaggcaaagatccaggacaaggaangggattcccccggaccagcagcgttctgatctttgctggcaagcagctcgaggatggtaggacccttgctgactacaaca

SEQ ID NO: 42499 - DNA, 517 bp, Oryza sativa
  Clone ID: uC-osroM202019d05b1
tgtgacaatgggaggtggcaaggacaagcatgacgagagcgacaaggggctcttctctaacatgatgcacggcgttgccggcggccatgggtatcctccctaccagggataccctcctcagggctacccgccgccgccgggagcgtacccgcctcctccgggggcttatccccctcctcctggggcttaccctccaccacctggggcataccctccacagcatgggtaccctcagcctggtggctaccctccacctggtggttacccccaacatggtggctaccctcctgcgggctaccccggatcatctgggcaccagggcggccatgggagtagcggtggaggacacatgggagcaatgctggctggaggcgccgctgcggctgctgcagcctatggggcacacaagatctcttctcatggccatggtggacacatgggctatggaggccatggaggctttggaggttacggccatggctacggcggtcaccacggcggcaagttcaagcatggc

SEQ ID NO: 42500 - DNA, 526 bp, Oryza sativa
  Clone ID: uC-osroM202019d07b1
tctcaccacccgatcgaacaccgccgtcacagcgcgtcgcggcgggggcgatgggcctcttcggcggcaagagcgcctcttcgaagcagaccgccaagctcaagtccctgatcaagctcgctgccgcgcgcgtcgccgtcgcccgccggccccgcctcgggcgccgctccattgcccgcggcgatgtcgcgcagctcctctccatcggccacctcgaccgcgctctcctccgtgcagagcaagtcatcgacgaggacaacatgctggaggtgctggacatcgtagagctctactgcaaaatcctcatcgagcaggccacgcagctagataagcccaaagagtgcggcgaggagatcaaggaggcggcggcggggctcatgttcgcgtcggcgcggtgcggcgacctgccggagctgctcgacgcgcgggccatcctggcggacaagttcggccgggacttcgccgcggcggccaaggacggcgccacggcgtcgtcgatcccacgttggtgcggaagttgtcccgc

SEQ ID NO: 42501 - DNA, 399 bp, Oryza sativa
  Clone ID: uC-osroM202019d08b1
gaggtgtatagtgtacagttacaaacatgggttctctggatttgcagcgatgctcacagaatctcaagctgaagaaattgcagaattacctgacgtcctcagcgtgaatcctaacatttaccatcaagcacacacaactcgaagctgggatttcctaggcctgaactattacgaacaatcaggccttctaaagaaagccaactatggtgaagatgtcatagtcggtgtcattgactcaggtatatggcctgactcagaaagcttcaatgacagtgggtacagctctgtaccgacccggtggaaggacacgtgccaaactggctggcgttcaatgccacacgcttgcacagaaagatcatcgttgcccggtggttctcaggtggcattcacgatgagtcg

SEQ ID NO: 42502 - DNA, 488 bp, Oryza sativa
  Clone ID: uC-osroM202019d10b1
tgaggaggaggaggaggtgcccaaacgcagcggcggcgatctccccacaaatccagtcacccgcattgctccaaatccagcccggcgaccgcggcggagacggccactgcgacgccgctctcctcctccacttcctcgagactgaagaacaacatttctttacttggacagtgcttccttttgattatcactatttctcttgctcctaagttatggcaactatggttgaggggtgtgttggtccaagtgagcttcacttgaaaaaggaacttactgcactacgaaaggcacggttcttgcgtgatcctgaaacatgttcatcatggagatcgcctttgagttctaaatcatttatgacaacttcgtgtgttattaatcccaatgagattggcagtaatgtatcacaaaagcacattgagccagctgctgcacctcaaagggtgaaaagaaaggaaaaggtttatcttacaattggagcatcattctac

SEQ ID NO: 42503 - DNA, 504 bp, Oryza sativa
  Clone ID: uC-osroM202019d11b1
tgcaggaggcgaatgcgatggggtccaagacgaaggggtgctgcgggtggctgatcgtggcgctggtggcgtcgctggtggcgacggcggcggtggtggccatcatgaagaagaaggtcggcggggggagcgggcgcaagctcaagccgctgccggtgcccggcccgcccggggccatcgactccaagtacggcgacgcgctcggggtggcgctccagttcttccaggtccagaaggcggggaagctggagaacaaccagatcccgtggaggggggactcggcgctggatgatgggaaaccagcggggctggatctttccaagggaatgtatgatgctggtgatcatatcaagtttagtttcccgatggccttcacggcaacggtgctctcgtggtccatacttgagtatggagatcagatgagcgccacgaagcagctggaccctgcgcttgatgctctccgatggatcactgatttcctcgtcatgcgcatccattgacaat

SEQ ID NO: 42504 - DNA, 462 bp, Oryza sativa
  Clone ID: uC-osroM202019e01b1
tgcggtttccgcttagctagccgcagctgaaaatctcctcctccatttcgaagcagagcacagcagccgccgagtgtttgattgctgcagggtgtctcggcaaagcgcgacggcgacaatggcagctcgtgtcgtggtctaggaggagggagcaggagcaggagctgcgtgcgtttcttggtttcttcttgtgcgtcgcctcgcgcattggggacgacgtgaggtgatcgggcgaggaggaaggaggaatggcgcgcgggaaggtggtgttgatggtcgtggtttgtctcgccgtggcggcggcggcggcgtcggcggcgagcggtggggggcacagtcgcggacgcccgggcaagtcggcgaggctgcagctggtcccggctgccccggacgcgtcgatggccgagcgggcgagggatgacatgcggcggcacgagtacatctccgccaggctcgcggcgt

SEQ ID NO: 42505 - DNA, 528 bp, Oryza sativa
  Clone ID: uC-osroM202019e02b1
tgccccttatgcattagagcccccggagtcccctctgtttcgcagataagtcctttggttcccatctttttattacattcaggtcctcctagtttcttttcctttcgagtctactccttgcattcttgcgaggaagcccctcgggttggtcgaattttagtttccactccctctcctcgcggagtcgttgctgttcttgttcttggtcgaggttgaggttggtggcgtagatccgatctgaggaatgtttacctatcctttcctctaacgttcgccgtactccgatgaagttgaacgtgctccgccgccgccgttcccactccttctccgtcgccttcctctactggttctacgtcttctcatgaactcatcgccttcctcccaagaacaccatctccagcctctaattgattatatcttgatttctttttcatcctcctactagtttctttcttgtgttctttggaatttttttgatctcttgaagagatcccgttcttggattaagttttggacaagaaccgtact

SEQ ID NO: 42506 - DNA, 513 bp, Oryza sativa
  unsure (1)..(513): unsure at all n locations
  Clone ID: uC-osroM202019e04b1
cccacgtacatgatccgcgccgtgccgtccaacgcctccgacaacgtctactgctcgctgctcgcccacagcgccatccatggcgccatggccgggtacaccggcttcaccgtcgcacccgtcaatggccgccacgcctacatccccttctacaggatcacggagaagcagaacaaggtggtcatcacggacaggatgtgggcgagggtgctctgctcgacgaaccagccgtgcttcctcagcacggaggacgtcgagaaggcagggcaggacgacgaggagccgatcgtgccgctcgtcgagggcgagaactcgctcgtcaaggcgccgccgctgctggccaacgccgggcgatggcgccgccctctgcaacggcgccgcctgagcttgaaaaagtagctacacgaagaagacgatcacacggccatgtttggtagtgcgaaattacagaaatggttatgtaattggaggatantttttttcttagattctttttgctcattatttttcggc

SEQ ID NO: 42507 - DNA, 511 bp, Oryza sativa
  Clone ID: uC-osroM202019e05b1
taggacaagccagcgtctctctctttctcgtctctccaatggcggcggcggcggcgtcgtcggagtcagcggatgccgccgccgctgggccgtcgacgctgagcatctacaaggcggcgcggcgcatcaagcggcgggagagcacgctgtacaacgcgctgcggagcgtggcggacgacgccgcgttcgtggcggagatcgcggcgctgtggccggcgctgccgctggtcgccaacctccgctgcgggctctggtacttgccgccccgcgccgtcgccgccacctgctacttcaagtccaccgatgggcacgcgggcaactgggccttctccaccgcccgcctcaacctccacctcgccctcctcgctggggagagaggagggtgcataattgttgattcaacaaggagagggaaacgtttccctgacagcatgtcaaagaccatacccattggtgttgtgtcctaaccgagcaatgagaggtatcggctgcagactaacaacaagtcagc

SEQ ID NO: 42508 - DNA, 481 bp, Oryza sativa
  Clone ID: uC-osroM202019e06b1
tgtcgtttgccccgacggcaccttcaccgacgtctgcatcgggtggccggggtccatgagcgacgagcaggtgctccgcaagtcggcgctgcaccagcgggcgtcggcggcggctgggtcgatgtcgtgggtggtgggcggcgcgagctacccgctgacggagtggatgctggtcccctacgcgcagcgcaacctgacgtggacgcagcacgccttcaacgagaaggtgggcgaggtccggcgcgtggccacggaggcgttcgtccgcctcaaggggcggtgggcgtgcctgcagaagcgcacggaggtgaagctgcaggacctccccgcggtgctcgccgcctgctgcgtcctccacaacatctgcgagaccagtggggaggacatggaccccgaccttcgctgtgacctcccccccgacgaggaggaggacgacaccgtgcttgtgcagtcggagtccgccaacaggtgagggacgaca

SEQ ID NO: 42509 - DNA, 523 bp, Oryza sativa
  Clone ID: uC-osroM202019e07b1
aatcgaacaaaacatttgagggagaaagcttggggaggaggagctcgtcgcgatcgatggaggtgggagcgaaggtgcccaagaaggccggcgccggcggccgccgcggcggcggcgggccgaagaagaagccggtgtcccgctccgtcaaggccgggctccagttccccgtcggccgtatcggccgctacctcaagcaaggccgctactcccagcgcatcggcaccggcgcccccgtctacctcgccgccgtcctcgagtacctcgccgccgaggtgctcgagcttgcggggaacgcggcgcgggacaacaagaagaaccggatcatcccgcggcacgtgctgctggcgatccgcaacgacgaggagctcgggaagctgctggccggcgtcaccatcgcgcacggcggggtgctgcccaacatcaacccggtgctgctccccaagaagaccggctccgccgcggccaaggaggccaaggagggtaagacccccaagtcgcccaagaaggccaccaccaagtc

SEQ ID NO: 42510 - DNA, 402 bp, Oryza sativa
  Clone ID: uC-osroM202019e08b1
actaaaaccctagctggtcgactcgcccacggcgtcgctcgactagcctgatcccgccgcgtcgtaacagcagggcggagccatataatgcgaaaaggcaggtgcaggcctcggcaagggaggcgcacggaagaagaaggaggtgaagaaggaaacgaagctcgggatggcgtacaagaaggatgacaacttccgggagtggtactcacgaggttgtcgttaacagtgaaatgatcgagtactatgacatatacggctgatatatcttgaggccatgggcgatggacatctaggaaccgcttaatgaattctttgatgcagaaataaaaaaggtagaactgaacacctattatttcccattgtttgtcactgagaatgttctacagaaagagaaagaccaca

SEQ ID NO: 42511 - DNA, 521 bp, Oryza sativa
  unsure (1)..(521): unsure at all n locations
  Clone ID: uC-osroM202019e09b1
ctaacttacgtgcgggtgttaattttgctcaagctggctgttcaattactccagcaacggcaacatctgtcagcccattttcatttggtcttcagattaagcaattctttgcattcaaggacaaagttactaagcttctatctaaaggagatacgtacaggagatatattcctcagtcggattacttttcgcagggactttacacgtttgacataggtcaaaatgaccttgctggtgaattctactggaaaacagaggaccaagttgctgcatccattccgactattttgttggaattcgaaactgggctgaaggtttgtatacacagtattttcattcttaagcttttgcagtgcatggaacctttttttcttcttcaatggtcttcagtagtttgtagaatatggttttcagtcttcaaaaaataatctgtttgccttggccaaaaaataatcagtttgccattnttccatactggtccaactatgtactgtttgattgggaaaggacctactctaacg

SEQ ID NO: 42512 - DNA, 510 bp, Oryza sativa
  Clone ID: uC-osroM202019e11b1
gctctagtgctttagccttttccattcacgccaaaggcaacctcgagttcagctcggtacgtgtcggggagagtcaagagaaagagaaagagagggctagcttagctgtgagctccatggaggcggctgtcatggagcgggagcggctcacggcggagatggcgttccgcgacgacgcgcgggcggccgggggggagtgggcgccgagcatcgtgatcaagatccggcgccgcctcccggacttcgcgcggtccgtgaacctcaagtacgtcaagctcgggatccggcacggcggcagcgtcacgtcgtacctgcccatgctgtgcgtgccgctgctcgcctccgccgcctactccttcgtccgcctcgacgtcatctaccgctccatcgacctgctcacctgcgtcgcctggctcggaccgccgtgctgctgctcaccgtctactacttcaagcgcccgcgcccggtgtacctcgttgagttcgcctgctacaaagccgacgaccagca

SEQ ID NO: 42513 - DNA, 492 bp, Oryza sativa
  Clone ID: uC-osroM202019f01b1
ttatcctttacctcaagaggggcggcaaccggttcatcaagaccgcggcgtacggccatttcggccgcgaggatcccgacttcacatgggaggttgtcaagccgctcaagtatgagaaggcatcttcctgaggaagaagataaagatgatgaccatgagaggggggtctctctctcgctatctacctccattgccggccgttgtcggcgccgccgccgcctacctgatgtgtctttgatcagtagtgactggttgctccatggaagaagaagaagatgggaagatgatgaaagggttgaaatcgacttgcgaagtttctagtgatatcggagtagcagccagagttttagtgttcagatatcttcggcgttttatccttttttcattttttttgagtcagctgaactgcaagagagcttgcagattgctctataatttggcttgttcttttttttttcaggttgtgtgtaccccatctgtaatactgctctt

SEQ ID NO: 42514 - DNA, 403 bp, Oryza sativa
  Clone ID: uC-osroM202019f03b1
gacccacgcctcctatccattctccagctctctccccctgggcgcacagacgcatacaaggatacaatcttcccccatggccgcaagttcttcgttggtggcaactggaaatgcaatgggaccactgatcaggtggacaaaattgtgaaaattctgaatgagggacagattgcttctacagatgtcgttgaggtggttgtcagcccgccttatgtgttccttcctgtggtcaagagtcagctgcgcccggagatccaagttgctgctcagaatttgttgggtgaagaagggcggggctttcaccggtgaggtcagcgctgagatgcttgtcaaccttagtattccctgggttattcttggacactctgaaaggaggagcttgttgggtgaatcaaatgagttt

SEQ ID NO: 42515 - DNA, 491 bp, Oryza sativa
  Clone ID: uC-osroM202019f05b1
cttcctactaggctactactactcctcctcggctcaaccctcccgtcccctcacccccacgcgcgccgccttctccccagaacgcgccgcggcgaagcgccgccgaagcagcccccactcctccgcgcgcggcggcggcggcgcagtctccagacgcttcctcctccggggatctcgcctttgaatggaccgaagtgattccatggctgattcgccaaggaggcgtaatggccttctgcgggaccaggtccagttggtgaaaaggaaggacacaaatcgctacgaaatcgtccgctttcctgatccattgtcatttgagaaaggcttctttgttatgatccgtgcctgccagcttctggtgcagcacaatgaagggatgatttttgttggcgttgctggaccctctggggccgggaagactgtgtttactgagaaagtgctcaatttcagcccggtgttgctgtgatatcaatggataactaccatgatgc

SEQ ID NO: 42516 - DNA, 450 bp, Oryza sativa
  unsure (1)..(450): unsure at all n locations
  Clone ID: uC-osroM202019f07b1
tattcgcagcatcagtgtgcgtgacaaattttcaggagctaggtgacatgggcgacttgggcggcggcggcgagacgaaggacgtcatcgacgtggaggcggtggtcgtgggcgccgggatcgccgggctcgccacggcgctggcgctgcggcgggcgggctttgcggcgcgggacggcggcggtggcggtggcgtcgtggtgctggagcggcacgccgagctgcgcgccacgggcgccgcgctcaccgtcttccccaacggctggttcgcgctccgcgcgctcggcatcgcgcacaagctcacccctcgctaccaaccctacgaaacatccgtggtgaccaacctcgagtccggagcgacgcaggtgtttcggtttggtgggcacaagagcaggagcggcgaggtgagggtgaggccggtgcaccgganggagctgctggaggcgatgg

SEQ ID NO: 42517 - DNA, 320 bp, Oryza sativa
  Clone ID: uC-osroM202019f08b1
acgtgccagtttccagctttcttcccttccgcgtcacaccttatgtcttcagctacacacaccagatgggcgcgatgccggtgaccgcgggtagcacgcgtacgccctgcgtaccactgcgcaggaggccgccaccgcgcgctcgccggaggaggcgccgagctaaaccgcacacctgtccgccgtgcgcgtccaggccgagctcacggggtcttcgctgcgcacgaggaggggacggcgccgacagacgacggcgggccggatatgatagatgcgtacagaaggccggcattctcacctttgcggaggcgtcacgccag

SEQ ID NO: 42518 - DNA, 530 bp, Oryza sativa
  unsure (1)..(530): unsure at all n locations
  Clone ID: uC-osroM202019f09b1
tcggtattgatgccgtgcatgggcacaataacgtctacaaggctacaatcttcccccataatgtcgggctcggcgctaccagggaccccgacctagtaaagaggataggagaagcaactgctcttgaagttagagctactggaattccctacgtctttgctccttgcgttgcggtttgcagagacccaagatggggacgctgctacgaaagctatagcgaagacccaaaggttgtccagtcattgaccacactcatctctggcttgcaaggcgatgttccatcaaatgatgtaggaagaccatatgttggtggaagtaagaaagttgctgcatgcgcaaagcactatgttggtgatggtggaacggtcaagggaatcaacgagaacaatacaatcatcgatactcacgggctgttgaccattcacatgcctccttattataattctatcattagaggagtctccactgtcatgngttcatactctagctggaatggagtaaaaatgcacgcgaaccatcacctaatcact

SEQ ID NO: 42519 - DNA, 508 bp, Oryza sativa
  Clone ID: uC-osroM202019f10b1
tgattgccgccgccgcccacggtttccagcaatcgccgcggttcgcgccgccgccgccgagcggagcagcgccccgatcgatccccttcccctcccgcgagcaaccgacgccggcggaagtcccagctgcttccgccacttcgcccgaaatggatcgacctgatgaaaccgtgaaattcccaagctgtgatgcgtattttgacactatacagtccaagaagaagctgcccctctctttgcaagaatcgctcactgctgcctttgctcagattcctgtctcgtcttttcctgatgttcctaatggccgagtgattgaaattccaggagacacttccgttcttgacgctgtgagaattctctccaaacacaacattagggcagcgccagtgctaaatccggaatgtggagctccggctgattggaagggaggtaccttggcatcattgattactcggctatcatcctctgggttctagaaaatgctgagattgccgccgttgctctatca

SEQ ID NO: 42520 - DNA, 461 bp, Oryza sativa
  Clone ID: uC-osroM202019f12b1
gtcacgatggccatggctgcggcgagcgccatgcggccattagctcccctcttccttttcttcttcttctcccttgccgcctccgcgagtgacaacattcttgccaactcatctctcgccgatggccagaagcttgtctcggccggtggggtcttcgagctcgggttcttcaccccgccgggctcgacgacggcggcgaggttcttgggaatatggtacagggacatcgatccgccgaccgtggtgtgggtggccaaccgggatgctccggtgagcggcacggccgggagcttggctgtcgtcgtcaacggcggcggcggcggctgcggtggtcgtctggtgctcggcgatgggccggggcgagtggtgtgggtcgtcggcgccgacgaacgtaaccgcgagtgatcctgtggcggcgaggctgttggatagtggcaacttcgtgctcgccgcggcggtgg

SEQ ID NO: 42521 - DNA, 520 bp, Oryza sativa
  unsure (1)..(520): unsure at all n locations
  Clone ID: uC-osroM202019g04b1
ttcaacaacaacacacagcaacaggcctaccatatcgcgagaaggcccccagcgtcgcggagccgaaggatcaggattcactccgccctcgccgacctcgtcgccggccgccgcatcaccaccgacacctccccccatcgccgccggcgagagttgggtggtggagcgagcgtggccgcgaggggacgcggaggggcggcggcggcggcgattgttcgcgggatgagcagcttcggcggcaccagctccgtcgcctccggtggtgggaagaggctcgagtacgggcggacgcatgtcgtgaggcccaagggcgcgcacaaggccaccatcgtctggctccacggcctcggggacaacggagccagctggtctcaactactggaaaccctttccctttccaatataaaatggatttgccccaccgcgcctacaggccagtggcagtttttggtgggttcccatcaactgcatgngttgatgttgctgatctttcagaagacgctcctgatgatgttgaggg

SEQ ID NO: 42522 - DNA, 501 bp, Oryza sativa
  Clone ID: uC-osroM202019g05b1
gatgctatcgagattttaacacaatctctttcgagaaattgttctgggtttactctgcttgttttcatccttcatgtgatggctctgcagagactaaatgaccttaacaggcagattaatgcttttgattttttgcttgaagatgatacagatcaatttgacaaggagaatagtgaaggcactgagttattaaagaagtctagctgtctcgaggccacacaactcaccagttttatgatgagctatgtgagactattatcatcaggagaaaccggctctttttggtgttatgagattagttcttcctgggattcaagtctatgctctttagatgaattttcatttcctatagcaacttggcaactgctgtgtgaaaacattgatatttggagcccccatgcatctaaaaaggatttgaagaacttcttttctaatctgataaagtttgcttttgttgaaaagaggtcatgcaaagatgtggagaatagtggcagccaatct

SEQ ID NO: 42523 - DNA, 306 bp, Oryza sativa
  Clone ID: uC-osroM202019g07b1
ttaagtatccaactaacgcaagatggctctggttgctcaggcctccaccatcgcgcagttcgccggagtggacgcctacggcctgatcaaaatgatcgccgaggcggcgcagacggtgcggcgcaacagggcgacgtgcctgcagctcgcgcggcgcctcaagatgatcggagatcttctcaagcagctccacggtgcgcagctgatgcagcagccggagacgaggaacccggtggagcagctggaggagacgctccggcgagcgtacctgctcgtccggtcatgccaggggccgagctacgtgta

SEQ ID NO: 42524 - DNA, 228 bp, Oryza sativa
  Clone ID: uC-osroM202019g08b1
tctgaggctttgacaaaccttgggaatgtatatatggaaaggaacatgatggacatagcagcttcactgtacatggcaacactgacagttacaactggattatctgcaccttacaacaacttggcaatgatttacaaacagtaaggtaactgtaatcacgccattacatgattcaatgaagtactccgcattgatccaattgctgctgactgtctggtcaatagaggc

SEQ ID NO: 42525 - DNA, 516 bp, Oryza sativa
  Clone ID: uC-osroM202019g09b1
ctttttgatgctatcgagattttaacacaatctctttcgagaaattgttctgggtttactctgcttgttttcatccttcatgtgatggctctgcagagactaaatgaccttaacaggcagattaatgcttttgattttttgcttgaagatgatacagatcaatttgacaaggagaatagtgaaggcactgagttattaaagaagtctagctgtctcgaggccacacaactcaccagttttatgatgagctatgtgagactattatcatcaggagaaaccggctctttttggtgttatgagattagttcttcctgggattcaagtctatgctctttagatgaattttcatttcctatagcaacttggcaactgctgtgtgaaaacattgatatttggagcccccatgcatctaaaaaggatttgaagaacttcttttctaatctgataaagtttgcttttgttgaaaagaggtcatgccaagatgtggagaatagtggcagccaatcttctcaccga

SEQ ID NO: 42526 - DNA, 322 bp, Oryza sativa
  Clone ID: uC-osroM202019g10b1
ccctcggcaacgtaacacaagagaagaagagatcgccatgtccaacgtgcccacctccctccgcgactcctccctcaccgtcttccgcctcgccatctccagctccgacccctggcccttctccctttaaccccatcaaacgcttcttcctcttccaagaagatcacaagcttcttcgtgttcttgttcttcttcggatcactcggttggtttcttggtttcttggtttcttggattgttgcgagatgcacgggaagcatcagcatcagcagcagggggggttgttggtgggtggcgccgaaggggtgcgtgacggtgaggt

SEQ ID NO: 42527 - DNA, 408 bp, Oryza sativa
  Clone ID: uC-osroM202019g11b1
agaatcaaacaattcctagttccactttgccagtcctaccaaagcacattttagccatggctagtccatttttcaaagttattccagtacggcctgtgctccgcgatcagtgtgagattaccatgagattgtacttgcaccaagttgttacagggccaaaccacaaccaagaaacaatggtgccctcatcacatcccgcttcgtttggtatgattgttatcaacgattggcctatctatgatggacctgacttcaacacaagtactattgttgcacatgcaagaggaatgcatgtccaggttgatcaagttaacaacacctggtacacatctatgaacatagagtttgtggatgccaggtttaatggatcaaagcttcaagtgatggggactactccagaactggtga

SEQ ID NO: 42528 - DNA, 498 bp, Oryza sativa
  unsure (1)..(498): unsure at all n locations
  Clone ID: uC-osroM202019g12b1
ttgctatctgatgcagaatcagtacgctggttaaattatgcaataaaaaagatgtggcctatctgtatggagaagatcgtctcacaacttctacgacccataataccatggttcttggataagttcaaaccttggacagttagtaaagcaggagttcaggagctttatatgggcaggaattcaccactgtttacttcaatgagagttttacctgagacatcagatgatgaccatttggttctggagatagggatgaattttctatctgctgaagatatgagtgctgtactttctatgcagctgcataagagtgtcggacttggaatgactgcaaacatgcatctgactagcatgcatgttgagggaaagattctagtccgtgtgaagtttgtccggagttggccatttcttggccgtgtaagactatgttttgtggagcctncttattttcagatgactgtaaagccactcattggtcatgggcttgatgtcactgag

SEQ ID NO: 42529 - DNA, 447 bp, Oryza sativa
  Clone ID: uC-osroM202019h01b1
tcacgctcacgcttcactacaacgcactgtacacagttgattattagctagttgggtttctggcccggccgccggcgagatgggcaaggacaagcaccaccgcgactggatcctccggcggtgctgcggctccatcgccgcctgcatcctcacgctcgccgttctcgtcggcttcatcgtgctcgtcatctacctcgcgattcacccctccaagccttctttctacctccaggacgtccagctccgcaacatcgacctctccgaccctgccatctccctcaacctccaggtgacgatcgcgtcgaggaacccgaacgacagggtgggggtgtactacaagacgctgcacgtgttcacgacgtacagggaggagccgatcacggtgcctgtggagcttgcggcgatctaccaggggcacaaggacgtgtctgtgtggtcgccggtgat

SEQ ID NO: 42530 - DNA, 475 bp, Oryza sativa
  Clone ID: uC-osroM202019h04b1
ttgaaaaatttctccccaatctcgcgaggctctcgtcgtcgaatcgaatcctctcgcgtcctcaagatgcagatctttgtgaagacattgaccggcaagactatcaccctcgaggtggagtcctctgacaccatcgataatgtcaaggctaagatccaagataaggagggcatccccccggaccagcagcgtctcatcttcgctggcaagcagctggaggatggcaggacccttgctgactacaacatccagaaggagtcgacccttcaccttgtcctccgcctccgtggtggcatgcagatctttgtcaagactctgaccggcaagactatcacccttgaggtggagtcttctgacaccatcgacaacgtcaaggccaagatccaggacaaagagggcatccccccagaccagcagcgtctcatcttcgccggcaagcagctggaggatggcaggacccttgctgactacaaca

SEQ ID NO: 42531 - DNA, 522 bp, Oryza sativa
  Clone ID: uC-osroM202019h05b1
tgaccagactgttaaggttgttggtaattgggatgatgtgctcgtaatgtgtaagaaaggtcacttgcaacctcaggtgctcttctttgaagctgcaaagtaattgttccttcagataggcttttccttgtggtgttgtgaagattagaaattgataccaaattcgttttgagctgtgggggataaaggcgtaaagtggtaattcagcagttgcactgatcagttagttttgtcatgccccgtcataaataaacggtcacatgagaatactagaaatagaaaagccagtaatccttttgtttaggttttttggagcttcggtatagttctgatccctgatcctgtcaataagattttggcataggagtgggagggtggccattcgatcgtttgccatctagaggatagagaaaatttcagagattcataagcattgctgaatttattttgaagctgatccgaatgcatcgacgatgtacagagttgtgtttaccatgggaaggctataggggctggtgttca

SEQ ID NO: 42532 - DNA, 535 bp, Oryza sativa
  Clone ID: uC-osroM202019h07b1
gcacgtcgtcccccaacaaccgaggcacgaggtccgccgcctgcatcacccgcgacgacctcgctgaggccgcgcgcctcgtcgaccgctcacgtggggaggcacccgacgctgccgtgaagaccaacgccggcgaagtccgtgagtcgaagcaccaggcgcacacagccgctccagtcgtccgcggtgttggggcttgacttcgaggacaccgacctcaccctccggctcccgggctccctcgccgccgccgtccccgaccccgaccgcaagcgctccttctccaaagccgacaactcctcccccctcgccgccgccgccgaagccgagaacgagacggccgcgagttgggcgtctagggagatgaggagggagcgggagaagaagaagagggcagcgcccacctcgaacggcgcggcggtggagtgcagcgaggacgccgacggtcgcgaggacgacgagctcaacgacggcgaatgggaagccgtcgtcccgaccgcgtcgtcatcccgactctgctaccatccgtactccg

SEQ ID NO: 42533 - DNA, 312 bp, Oryza sativa
  Clone ID: uC-osroM202019h08b1
cccagaccgagactaaccctgcattgaccatacttggtgcttggggagctacacatcggaacattacactgacgggaacaaaggccgaatctttggtgaataggctgatcaggaggaccatagaggcatgcaagaatcgctcgaaggatgctgacataactaccaaggcggttgacgaggtccttcttgttggcgtcatgacaagagacacgcaagtgcagtacatcgccttctagatcttttgcttgtccacaacgctaggcggataccacataaaagttacggcgatcggtggatgcatacacgacggca

SEQ ID NO: 42534 - DNA, 498 bp, Oryza sativa
  Clone ID: uC-osroM202019h09b1
tctcctgcaatccttatcacacagcaaacccaaaccgtgagcggaatcctcagcctgctgagagagcctgtgaccaagagggggattctttcttggttattgacgatggcgcagcgcgacaagaaggatcaggagccgacggagctcagggcgccggagatcacgctgtgcgccaacagctgcggattcccgggcaacccggccacgcagaacctctgccagaactgcttcttggcggccactgcgtacacctcgtcgacgtcttttttgtcgtcaccggtgctcgacaagcagccgccgaggccggcggcgccgctggttgagcctcaggctcctctaccaccgcctgtggaggagatggcctccgcgctcgcgacggctccggcgccagtcgtcaagacgtcggcggtgaaccggtgctccaggtgccggaagcgtgtcggcctcaccgggttccggtgccggagcggacacctgttctgctgcgagcactggtac

SEQ ID NO: 42535 - DNA, 392 bp, Oryza sativa
  Clone ID: uC-osroM202019h10b1
tcttgccagtgccttctgcagtgaatgcctccatttttgaaagttttgttaggcggaacattactgagtctgaaactgatgtccgttccagcattcagcagctggtgaaagatagctatggtttcccagcagatggttgttctgaaatattatatggcaacacctgtcttgcactcttcaacaagcttgccctttgctgcatccaagaccagggcaccttacttttccccttgggcgctaatggtcactatgtctcagcagcaaagtttgtgaatgcaaatacgctgactattccgacaaagttagaatcaggcttcaagattgaaccacggggttctagctgacacacttgagacagtatctaggccatgggtttatatttctggccccac

SEQ ID NO: 42536 - DNA, 504 bp, Oryza sativa
  Clone ID: uC-osroM202019h11b1
gctcatcaaacagcgcgcgcgagcgagggatggataggatattttcgttcgcgttcgtgccatcctaaatcccgtctataaagccgtgcacatctctatcctcacctccattccattccactcgccaacccgacacgtctctcatcttcacgcaacgaacagcagcagcagctcaagctaagctaagctaaagtactacgtgttctttcgtcttcgtcggcgccggagtttgattcgtcggagctagctagcaagaggaagaagaaaatgttggccatattccagaagcaggtggcgcacgcgccggcggagctgaacagcccgcggagcagcgcggcgaagcccaagaaccccgacgagatcctcagggacttccacgccctccaccccatcgaggccttctccacctccttcggcggcggcgccgccctcgcctgcgtcgccggccacgcccgcaatgcctctctggctcgagaggatgctctgtgggcttgatgacatcta

SEQ ID NO: 42537 - DNA, 444 bp, Oryza sativa
  unsure (1)..(444): unsure at all n locations
  Clone ID: uC-osroM202020a04b1
ttcttcattcagcaggccagctgaggaatcggaagaattcaaactctggtggggccaaagtttcagaaagtaccgatatagttacatttgctgatgtggctggagtagatgaggccaaagaagagctggaagagattgtggagttcctaaggaacccagaaagatatattcgtcttggtgcgcgacctccacgaggtgggccttccaggaactggaaagacgcttcttgcaaaagctgtcgcaggggaagctgaagtcccattcataagttgctctgcaagtgaatttgtggagttgtatgtaggcatgggagcagctcgagtgcgtgacctatttgctagagctaaaaaggaatctccttcgattatttttattgatgagattgatgctgtggcaaaaagccgtgatggcncgtatcgtatcgtcagtaatgatgagcgagag

SEQ ID NO: 42538 - DNA, 421 bp, Oryza sativa
  Clone ID: uC-osroM202020a06b1
ttcttactgttactgtacctcctcccatatatcatcttcatatttttgcagatcgataagcgagaaaaatgggagcacgctgcctcgcattgcttctcctctatggcacgttgctgctgctgttgctgctgccacagctgccgctcgccggcgcggcgacgagatactacaccttcaatgtgaagcttcagaatgtgacacggctgtgcaacacccgggcaatcccgacagtgaacggcaagttccccgggccgaaaatagtcaccagggagggagaccgcgtcgtcgtcaaggtggtcaacaatatcaaggacaacattaccatccactggcacggagtgaggcacatgcggacggggtggtcctacgggccggcgtacgtgacgcagtgcccgatccagacggggcagagatacgtgta

SEQ ID NO: 42539 - DNA, 447 bp, Oryza sativa
  Clone ID: uC-osroM202020a07b1
ttgactttatcagcctatttttttttttttttcgatcagccctttctctcgataaaatacttttttttgggtaaccgcttctgcttttttttgaaacaaaaaaatcaaactagtacaagttatttaaaacaaaaaacaagaaatggcattcgatagcaacgctggtaaacaacccggattggaaatctggcgcattgaacagatgaatcctgttcgtgtggacaagaaagattatggtcgtttctacactggagattgctacttggttctcaagtctactgagaccaagggctccatggctcaagatttgcacttttggttaggagccaattccagccaggatgaacagggagctgctgcctatcgaacagttgagcttgatgatcaactcggtggagctcctgtccaacaccgtgaggtgcagggacatgaaagcgccaagttctt

SEQ ID NO: 42540 - DNA, 476 bp, Oryza sativa
  Clone ID: uC-osroM202020a10b1
tgttcagcatcaatcaaattcaagctagtcacaacaataatggagccctccatctcgcgtcgacgacgtatcgacatcgctctcgtgtcgctgctgctgctcgccgccgccgccgccgccgtcgacgcggcgaccatcaccatggtgaaccgctgctcgtacacggtgtggccgggcgcgctcccgggcggcggcgcccggctcgacccggggcagtcgtggtcgatcagcgtcgccgccggcacaccggccgccaggatctggccgcgcaccggctgctccttcgacggcgccggccgcggccgctgcgccacgggcgactgcgccggcgcgctgtcctgcgccgactccggcgagccgcccaccacgctggccgagtacacgctcggccgccccggcgccggcggcgacgacttcctcgacctgtcgctcatcgacgggttcaacgtgccggtgagcttccagccggcgaacgg

SEQ ID NO: 42541 - DNA, 485 bp, Oryza sativa
  Clone ID: uC-osroM202020a12b1
gtcaagaagagaagcaagaggagagaggagaatcgctgcctctgccactggaaagcagcagcagcaggggagaggcagcaggcagcagcagaggagaagcaagaagcaagaaagagagagaaagcgttgggacttttcattggatcctccgcttttgggaggagcagcaaaggtctcgtctttcctctcttcttctcttccttgatgccggcgaggaggaagaagaaagaggaggagatgttcccgcctgggctgatccaccaccggccggacggcggcgaggcggggcgtgcggcggggggagggcccagcctggtgctgaccgccgatcccaagccccgcctccggtggacggccgacctccacgagcgcttcgtcgacgccgtcgcccagctcggcggccccgagaaagcaacacctaaaactatcttgaggacaatgggtgtgaaggggctcactcttttccacttgaagagtcatcttca

SEQ ID NO: 42542 - DNA, 456 bp, Oryza sativa
  Clone ID: uC-osroM202020b01b1
ttcttctcctctaatctcaagtctctgtctcgtcgtcctcgcatctccactcgccatgggcaagattaagatcggaatcaacggtttcggaaggatcgggaggctcgtggccagggtggccctccagagcgaggatgtcgagctcgtcgccgtcaacgaccccttcatcaccaccgactacatgacctacatgttcaagtacgataccgtgcacggccaatggaagcacagcgacatcaagatcaaggactccaagactctgctcttgggcgagaagccggtcaccgttttcggcatcaggaaccctgacgagattccgtgggctgaggctggtgctgagtatgtcgtggagtccaccggtgtcttcactgacaaggagaaggctgctgctcacttgaagggtggtgccaagaaggttgtcatctcagccccgagcaaagatgctccgatgtttgt

SEQ ID NO: 42543 - DNA, 442 bp, Oryza sativa
  Clone ID: uC-osroM202020b02b1
tttattactctctttctcctgccgataagcttggaaatctcactttggccctcgatatcggtgccaagtattgcaatgtcgaaaagtatctcgaagctgatgatatccacaagttggacgaagtctcgatgattgtgtatctttcggattggtactatggagtcgctcttcttcaaaagcaagacatctccgccaaaagaatcggaaaattggtcctcatgaccgaacttcatgatcaaatgagagcccaatacactgcgggagccaatgccttcatcagctgggtgaatgccaagattgccgagctcaatgtccgagatttcgacaatactctcgctggcgtcaagaaaaaactcgagcaattctacgcttacaaggctggagagaagagcaagcaattgacttccgtcttggacctcgaatccctcttcgacaacttggc

SEQ ID NO: 42544 - DNA, 468 bp, Oryza sativa
  Clone ID: uC-osroM202020b06b1
ttactctttgtgatttgagtctcctctcgctcgcgtcgggctacgtgctacgtttttcttcttcttcttcgtcgggtttacgatggctccccgcgtggcggtgctgctgatggccgtggcctcatcgctcctcgtgatggcgtcggcgcaggaattcaacgcgccggcctcctcgccggcgccgtcgccgatggccggggcggcgcccgggagcgcgtccccgctcgccgtcgcgtcctccgcgctcgtcaccctgctcgcggcggcgctcatgcagtagacgacgacgcgacgactccggcttctcccgcgcgcgtggctccggatttggttgcgtcgatcgagctgcgatcaaatcatgcatagttggtttctttcttctttattataattccttcttctttgggggagagagagagagattattgagtgagggtagtttgaatgtgagtggctcttgtgctcttg

SEQ ID NO: 42545 - DNA, 447 bp, Oryza sativa
  Clone ID: uC-osroM202020b08b1
tttttctcctcctctaatctcaagtctctgtctcgtcgtcctcgcatctccactcgccatgggcaagattaagatcggaatcaacggtttcggaaggatcgggaggctcgtggccagggtggccctccagagcgaggatgtcgagctcgtcgccgtcaacgaccccttcatcaccaccgactacatgacctacatgttcaagtacgataccgtgcacggccaatggaagcacagcgacatcaagatcaaggactccaagactctgctcttgggcgagaagccggtcaccgttttcggcatcaggaaccctgacgagattccgtgggctgaggctggtgctgagtatgtcgtggagtccaccggtgtcttcactgacaaggagaaggctgctgctcacttgaagggtggtgccaagaaggttgtcatctcaaccccgagcaaagatgc

SEQ ID NO: 42546 - DNA, 454 bp, Oryza sativa
  Clone ID: uC-osroM202020b09b1
tttgtcgttgaatcataccgagagcctaacgttgcacctgcgccgcgtgccaccatgtcatctcaggcgccgtcggcgccggtcacgccggcggctccaccgccgcagacgccacccgtgacgcctcctccggtgactgctcccccgccggtctcaccccctccggtgacgccaccaccggtgactcccccgccggtgtcacctcctccggtgagtcccccacctgtgacacctcccccggtgagccccccacctgttacacctcccccggtgactcctcctacaccggtggctcctccaccagtgccaccgtcaccgccttcaccgacgccgaccccaacgccggtgacgccgtccccacctacgtcggtgacgccattccctacttcgcctgtcggaagcccgccgccggccgatgtcccaaccgacccgccaccgagttacaaccccccgt

SEQ ID NO: 42547 - DNA, 480 bp, Oryza sativa
  Clone ID: uC-osroM202020b10b1
ttgttgacgcgtgggctcactcccaaatcacatgctcaaattcagattcagagtcgtcgaaatcagtagtattcatcaggaatggagcggctgagctcatcggtgcagtcgtgggtggaggaacacaagctcgccagcatcggagggctgtgggcgacggcggtgggcgcatcggtggcgtacgggcggaggaagacgccgcagatgcggctgatccacgccaggcttcacgcgcaggccctcaccctcgccgtcctcggcggcgccgccctcgcgcaccactactacaacccatcatccaagaccaacaacagcagcagcttggactacgacttctactcgcagctgccgccggccaccaccgacgacgggcaggagaacgagaggtggagctggtagtgctacccttccttcctgctgcaagatgcagacaaatgaagatgatgacgatcacgatgatcaattagtaataatctaatc

SEQ ID NO: 42548 - DNA, 464 bp, Oryza sativa
  Clone ID: uC-osroM202020b11b1
tttttcagcatgaaggtgggcgtggagatattggacgcgtctgagcttgcgcccaaggacggcgccggcgcctgcaacgcgttcgtagaggtggagttcgacgggcagaagcagcgcaccccgaccaagcccgccgatcgttccccgcaatggaaccacaccctcgtgttcgacgtccgcgacccctcccgcctcccctccctccccgtcgacgtctccgtccaccacgatcgcagcctcaccgaccaccacgccacccgcctgcacaccttcctcggccgcgtccgcatctccgctgtctccctcgccccctccccgcaggacgcccttctacagcgctacccgctcgagaagcgcggtctcttctcccgcgtttccggcgacatcgccctccgactctacctcatcgccaacgactcccctgatccttctcctgctcccgctgtccaccaccaccagcacca

SEQ ID NO: 42549 - DNA, 426 bp, Oryza sativa
  Clone ID: uC-osroM202020c01b1
ttcatgcagcacgcgtaagcaaggcagaggagagggaaagaacctctctgcagtgctgctgctgctagcttgcagaaaaaaaaaactctcatcttttgcaggaagagacatcactgcttctgcattcgtgtgcatttggattaagctttgcttatccctttttagtggagattgttgagtatatcaggtctatatattggcagctctggttggagatagacactcacactgagccaagatggggagtttgcacaagttcagtgttattctcctcatgttatgttctgctacgatggggagcgctcagtatgtcaagtataaggatccgaagcagcccgtctctgttcgtgtcaaggatctgctcggccggatgactctcgctgagaagattggcccgatgacccaaatcgagagggagaatgccac

SEQ ID NO: 42550 - DNA, 475 bp, Oryza sativa
  Clone ID: uC-osroM202020c05b1
agcccctcttggaaccaggacacgaagtgaaacacaatgcagtaggtttcttagaggcttggaagatacctggagttgcgccctttgctctgtgcctcttcttgtacaaattggttgcttacaccttcttgtattggctaccgttctacatcagtcatacacctattggcggtgagtacctctcagatgctttggctggcagcctatcaacaatctttgatgttggaggcgtgttgggtggagtccttgctggtcacatcttggatcgcttaaatgcacgagcggttacagctgccagcttcatgtactgcgcgatacctgccctctttctataccgcacatacggcagcatgtcgataatgtggaacatttgcctcatgttcatcaccgggatgttcgtcaatggtccttatgccctaattacaactgcagtgtcagctgaccttggcactcacagctcattgaatggaaattc

SEQ ID NO: 42551 - DNA, 451 bp, Oryza sativa
  Clone ID: uC-osroM202020c07b1
tcgttccgtcgttttcgttctcctctgcttcgcctcggccacgctgcggccacctcctttctgccacggcaaaagcctcctcgggatgctccactgatcgtcttctacttactcctctttcttccagcttggccggcgtgtggctgattattccagaatttccattagcttaatcaccggatcaagaagaatgagagaaaggggggagaggctcttttctgtgggatgacagattccgttttgtaggagcagcgcaccatttcagatttcttcctcctcctcttcttctttccgttgtgcttgctgcttttctctactaccttttccactgttgcgaagtcgggttggtgggtggttgattgattgttctttccttcctcgtgagggttcttgcttcttggcttcttggccgcttcttgagttggggctagctggttcttttgctgtctct

SEQ ID NO: 42552 - DNA, 434 bp, Oryza sativa
  Clone ID: uC-osroM202020c08b1
cgcttcctcgctctgctgtctcttggtgtctttctatatgctgctttcccaactcgttccccttgcttacttccttcctccctccgccctgatcctctctcgggattcgcctacgatcatccgcccgtgcgggagagcctagcggagcagaagcaggcacgcgcggcgacagcggcagcggcaaggagtaggaggaggaggaaggcgaggaccagggcgaggaccaggacgaggagggaggatatggcagcggatagggaagcgaccccggcggcggtgcggcagacgatccataacatcaaggagatcgaggacggccacaccgacgaggaggtctacgccgagcatcgcgaatgcaacatggaacccaactagaccaccgataggcttctcaaccaaggtacattccatgaggccagaacaaagagagacaa

SEQ ID NO: 42553 - DNA, 451 bp, Oryza sativa
  Clone ID: uC-osroM202020c09b1
ttgtttccaaccctaacgcggcggcgcggcgagcgatggcgtcgatcccgccggatgacgacgcggcggcggcggcggcggcgggggcggccgagaacgggtacgggaacgggaaggggaacggcaacgggccggcgccgcgcccgccgccggcgaagcggccgaggtcggtgatctcggcggcgcagatccgggcggagttcgagcaccacgaggccggggtggcgcgcgtcaacaacggcagcttcgggtgctgcccgtcctccctcctcgacgcgcaggcgcggtggcagcgcctcttcatcgcccagcccgacgacttctacttccacgccctccagccggggctccgccgctcgcgggctgccgtcgcgggccttgtcaacgccggggacgttgccgaggtctccctcgttgacaacgccaccaccgtcgccgtcattgtgctgca

SEQ ID NO: 42554 - DNA, 477 bp, Oryza sativa
  Clone ID: uC-osroM202020c12b1
tcttttactcctactttgaatacctgctcttgctcttcgcctcgctcgtctccaagaagctcgagagccgagggcttctccgtctcttcgttcatctgctgctgtgtctcccctggtgaggtacgacaagatgttggaacattcggagagtgcaacagaaaaaattatgagcagcatcatggataccattgctgagaaccttcctaagcagaaatctgggaaatttgacgtaggcgctgcctctgacaaaatgaaggagaagctgtttggtcgtcagaagaccattcatcgagttctgggtggtggaaagcctgctgatgtgtcgctatggaggaacaagaagatatcctccagtgtcctggctcttgcaacagcaatttgggtattctttgagtggctcgactaccactttctaacaattgtttcatttgcccttgtccttggaatggttgtccagttcgtgtggtccaatttctc

SEQ ID NO: 42555 - DNA, 291 bp, Oryza sativa
  Clone ID: uC-osroM202020d01b1
tttttattcagtcatcattcgatgaactggagaagatcacaacacctggtgatgacatgaatggggatatgtctagcttgtctacgctattcgctcataggaaaacggggcactttatgaagggtgatgctgtcattgttatcaaaggtgatccgcaaactagggagggttgggttgagaaagtaaaggctgagactgctcacatcacaacacaaagacgtgatctaccgaaaacgttagccttcaatgagaaagagatttgtaagtataccaaacccggagatcatgtta

SEQ ID NO: 42556 - DNA, 475 bp, Oryza sativa
  Clone ID: uC-osroM202020d04b1
ttatcacttctttctccggatcccctctcctctcctagcttcttcctctatctgtacattcgcaatatcccatcccatcggatcggattggatccacacaaaaatccccatcactgccggccgggccccaaacccaacgatccctccccgattccaatttcttccttcctgcaaatttaaaggatttctttcttcctttccttttcactgctcttttatttttttgagtgagttaacccccactgttgttattctaatggacgcagattctattttctttgtcttttaggagctccaatggacgccaatcctcctaccaccgccatgtatcctctccaccgctgcaaaaccatctacctggtcaggcatgcccagggtgttcacaatgtggaaggcgagaaggatcacagcgcctacatgtcgccccaactctttgacgcccaccttactccattgggctggaaccaagttgact

SEQ ID NO: 42557 - DNA, 476 bp, Oryza sativa
  Clone ID: uC-osroM202020d05b1
ttttgacttggatagtgaaagaaggaatggtacgggagataactcaagggtggatgtcctgagagatgacaaattagacagcggaagggacagaaactggagcgacagaacacgggagcctgaaggatctaaggactatgtgaggaatcgtcagtggcaagattctaaggaggcaaatgattctgaatggaagaatgcacatgaaagactagatggtgggagtttccatgggcgagctggttaccggcgagattctaggggtagatctgaaagtattagaggttcttcaacctatggaggtcggtatgacagttctgattcaatagagatccgaccaaataacaatcttgattttggacgagagggctctgtttctggaagaagatatgatgtgggagctcatcgggatgcaacacctggaacgaatggtgataaatccgccaatcctgaagcagatcaaagtggtagtaccagca

SEQ ID NO: 42558 - DNA, 443 bp, Oryza sativa
  Clone ID: uC-osroM202020d08b1
gtcaccgccatggccgccggcgttctcccccgaccgcgcccgcacttcctccgccgcggcatcctcccctcgccggcctccccgctccccttcgcttcccgggtctcctccgctgcgcccctccgccaccgcctcccgccgccgcgcttctccctctccccgatccccaagaccctctcctcgccgtcgcacgtccccgtccgctccctcttcaccggcatcgtcgaggacgtcggcaccgtccgccgcatcggcccgccgcccgcgccgccctccggcggcggcggcgaggcccccggcgttgacctcgaggtggagacgagcaccctcctcgccgggacgcagctcggggacagcgtggccgtcgacggggcctgcctcaccgtcgcggccatcgacgcggcggcgtcgacgctcaccttcggcgtcgcgccggagacact

SEQ ID NO: 42559 - DNA, 311 bp, Oryza sativa
  Clone ID: uC-osroM202020d09b1
tcttatgttcgccggcggcgcggatggcggcaacggccacctgccgcggccgcggagggcgcggcgcggcggcggaggcggatgaggaatgttgtttactcctttgtgaccgactactccgccctgcaccgactactacttggcctacttcaaggtgtactcccacatcgttgtccactatgagatgttcaaggaccatttgagaactaattcttacagaaatgctatcatgcattaccaggatttaatttcatgcaaagtctgtttttgttgtgtgctgtggcactggtgtactttttttattttgtgct

SEQ ID NO: 42560 - DNA, 491 bp, Oryza sativa
  Clone ID: uC-osroM202020d10b1
ctcctccggctcttcttcagtatcgaatcctctcttctcctcgtgcccaccaccaccaccgtagcaatggcgggcaacgggccgatcaacaaggaggacccgctcaactggggcgcggcggcggccgagatggccggcagccacctcgacgaggtgaagcgcatggtggcgcagttccgcgagccgctggtcaagatccagggcgccaccctccgcgtcggccaggtggccgccgtcgcccaggccaaggacgccgccggcgtcgccgtcgagctcgacgaggaggcccgcccccgcgtcaaggccagcagcgagtggatcctcaactgcatcgcccacggcggcgacatctacggcgtcaccaccggcttcggcggcacctcccaccgccgcaccaaggacggccccgccctccaagtcgagctcctcaggcatctcaacgccggaatcttcggcactggctccgatggccacacgctgccgtcggagac

SEQ ID NO: 42561 - DNA, 480 bp, Oryza sativa
  Clone ID: uC-osroM202020d11b1
ttgtctcaagaagatggcaggtgctgtgcgcaccggggggaagggtagcgtgcgcagaaagaagaaggcagtccataagactacaaccacagatgacaaaagacttcagagcactctgaaaagagtaggagtaaacaccatccctggcattgaagaggttaacattttcaaggatgatgtggttattcagtttctgaatcctaaagtgcaagcttcaattggtgctaatacatgggttgtcagtggaactccacaaacaaagaagctgcaggatctgctgccatcaattatcaaccaacttggtcctgacaacttggataatctgcggaggcttgcagagcaattccaaaagcaggctcctggtgcttctggtgaagaggctggtgccagtgctggagctgctcagggtgacgatgatgatgttcctgagcttgtacctggtgagacatttgaggaggcagcagaagagaaaaaggaatc

SEQ ID NO: 42562 - DNA, 421 bp, Oryza sativa
  Clone ID: uC-osroM202020e01b1
tgtctaagtcgcgtcgcaccgaagcagagtagagaaggagaggagcggagcgccatcagccgtccgatcgagtgatccgatggctctcgctctctccacctctgctgctgctgccgctgccgccgcggcgcgggcgctcgcggcgagggtgacgacgacgaggggttacgccgcgtctgcggcgtcgtcggcgatgaggcgggcggcggcggcggtggaagggaagggcgctgcggggatgacgcaggcgaaggacgggtcgtcgtcctcggcggcgagggaggtgtcgtgggtgcccgaccccgtgacgggccactaccggccctccaacttcgccggcggcgccgacgccgccgacctccgcgccggccaccttgcccgcagctacacccgcgcgtgatgcgcgcgacctcgccgtcgt

SEQ ID NO: 42563 - DNA, 456 bp, Oryza sativa
  Clone ID: uC-osroM202020e02b1
gcattctgcaggacctcatcctgtggcagaacgagctggagggcgagataccggcgtccctgtcgcgcattcagggcctcgagcatctcatcctcgactacaacgggctcacgggtagcatcccgccggagctagccaagtgcaccaagctgaactggatttctttggcgagcaaccggctgtccgggccaatcccttcatggcttgggaagctcagctacttggctatcttgaagctcagcaacaattccttctcggggcctataccgccagagctcggtgactgccagagcttggtgtggctggacctgaatagcaatcagctgaatggatcaatacccaaagagctggccaaacagtctgggaagatgaatgttggcctcatagttggacggccttacgtttatcttcgcaacgacgagctgagcagcgagtgccgtggcaaggggagcttgc

SEQ ID NO: 42564 - DNA, 453 bp, Oryza sativa
  Clone ID: uC-osroM202020e03b1
gtattagtaatgccacaaaaacatgcagtgcgtaataatattgaggcatcagaagtgaatgctgttcatttttcagaaatagtactagacaaatgttgttcatcagaagtgattccaacaagttgtctgcccataatacaagtagatcaacgagccattccacatgccatattttctgaacaaagtacaaagttcaaattgaagtagtaagaaaaatgagtcatgtgcagctttagttcaggcctgtaaaaagctcttggcagtcggcagaatacaacttacttaaatctgaactattttggtacatggttcaaatggtctaaaaataatttcctaggttggtccatttttagtagatcttttgtagaaccatctaatgaagaaattctggatgtaaatcatgatttttgcagctattgcttgcttaatctgcagactactgatttttgcttc

SEQ ID NO: 42565 - DNA, 477 bp, Oryza sativa
  Clone ID: uC-osroM202020e04b1
tttttcaccaaccccgtctccttcctccattcctccgccgctagaaccttctagaagctctcctcctcctcccatggcggcgacgatcgtgtccgtcaaggcgcgccagatcttcgacagcaggggcaaccccaccgtcgaggtcgatgtgtgctgctcagatggaacctttgcaagggctgcagttcccagtggtgcatcaactggtgtctatgaagctctcgaattgagggacggtggatctgattacttgggaaagggtgtttccaaggctgtcgacaatgtgaactcggttattgccccagctctgattggcaaggaccctacgtcacaggctgagcttgataacttcatggttcagcagcttgatggaaccaaaaatgagtgggggtggtgcaagcagaagcttggtgctaatgcaatcctggctgtgtcactggccatttgcaaagctggagctatcatcaagaagattcc

SEQ ID NO: 42566 - DNA, 475 bp, Oryza sativa
  Clone ID: uC-osroM202020e06b1
ttcacatcctctccttcctcttcctctgctcactcagctctcccccgcgcgcgccaccgtcgtcgccatgtcgggcaacatcgccttcggccgcttcgatgactccttcagcgcggcctccctcaaggcctacgtcgccgagttcatctccaccctcgtcttcgtcttcgccggcgtcggctccgccatcgcctacaccaagttgaccggcggcgcgccgcttgacccggccgggctggtcgccgtggcggtgtgccacgggttcgggctgttcgtggcggtggccatcggcgccaacatctccggcggccacgtcaacccggccgtcaccttcggcctcgccctcggcggccagatcaccatcctcaccggcgtcttctactggatcgcccagctcctcggcgccatcgtcggcgccgtcctcgtccagttctgcaccggcgtggcgacaccgacgcacgggcttgccggcgtg

SEQ ID NO: 42567 - DNA, 455 bp, Oryza sativa
  unsure (1)..(455): unsure at all n locations
  Clone ID: uC-osroM202020e08b1
ttcacccctctctctctctctctcgccccacccggatgcctcgcgctgccggaggctgacctcgccgccggcgactccgctcggccgccggagcagccagcgcgcgcgggtaagtcgactctcccccctccgctacgtgctgtcggacgttttgtcgggcggttttggttttggcttctgcgtcgagcagcaagggtgggtgggtgctcgatctgcgcgggctcgagtcgcggggagacttgctcgtggggagcgctctctcaccggaggaggaggaggaggagcaggngggttcctcctccggagcggcggccgcgtggtctgcggattctctccctggtgggaattatgaactacgcggcgctaccccaaactgctgaaacccacgcggatttattcgtttggtggtttttccccgggaatgaccttggtggggattcgtatggaaaagcccc

SEQ ID NO: 42568 - DNA, 446 bp, Oryza sativa
  Clone ID: uC-osroM202020e09b1
tggtcacatatccacacacctcgacacgacggcgacggcgacggcgacgatgactgcgggccagcctctccgggacgatccccagccacgccggcacagcccgccggcgctccacccggccgtcgtgccggcgtacccgcccccggagtcggacgccgacgagtcgtgggtctggtcccagatcaaggccgaggcgcgccgcgacgccgacgccgagccggcgctcgcgtcgttcctctacgccaccgtgctctcccacccctccctcgaccgctcgctcgccttccacctcgccaacaagctctgctcctccacgctgctctccacgctcctctacgacctcttcgtcgcctccctcgccgcgcaccccaccctccgcgccgccgtcgtcgccgacctcctcgccgcgcgctccagggaccccggctgcgtcggcttctcccact

SEQ ID NO: 42569 - DNA, 480 bp, Oryza sativa
  Clone ID: uC-osroM202020e10b1
tcgttaagaggaagacgacggcgaggtggacgagccaggtgagggtgagcgcggcgcgcggcgcggaggggccagccgacgacgggcacagctggaggaagtacgggcagaaggacatcctgggcgccaagcacccgcgcggctactaccgctgcacccaccgcaacacgcagggatgcaccgccaccaagcaggtccagcgcaccgacgacgacgcctccctcttcgacgtcgtctaccacggcgagcacacctgccgcccgggcgccgccagcgccgccgccgccaagaggccgcacgcgcagacgctgctgcagagcctcagcgccagcctcaccgtgaacacggacaccaacacgccgctgacgccggagaaccgcgcgccggcgccgccgctgcagcagcagcagcagcagcagagcgtgtccggcgtcgcccgtggcgtcggactcgtacggcctgggcggcgccgggtacggg

SEQ ID NO: 42570 - DNA, 479 bp, Oryza sativa
  Clone ID: uC-osroM202020e11b1
ttttatccgccgccgccgcctccctacctccatctccatctccatgaccgcctgcgcctcctcctactcaagtccggtccggcaacaacctccttcactcataaagcccggaaactactgagacctcctctttcacatctcaaacagagttcatgggtagtacagctgcagcgggtggtaacctgcgaaccgccctctcgtactgtgtgcagcaagttcgcaactatgattatcaccactatctctgccttctccacctacctccagctatgcgcaaggctgcattcgccttccgagccttcaacattgagacggcaaaggccatggatgttgtctcggaccctaagactggccttatgcgcctcctctggtggaaagatgtagtcgacaaggtctttgcaaacaagctggttgagcaccctgttgcccaggtgctctcttctgttgtgtccgagcacaagattagcaagcattggctc

SEQ ID NO: 42571 - DNA, 475 bp, Oryza sativa
  Clone ID: uC-osroM202020e12b1
ttcggcccggtgctctactgcctcgaggtcgccctgtaccaacgcggcggcggcggagacggcggtggcgacgacatggacaagagggtgggggagatgatgcggcagctcaagtacgtgcggggcctggagttcgcggcgggggtcgggtacgtggacttcctctcgcgcgtgaaccgggtggaggacgaggcccgccgcaacgggagctgggccgcgccgcacccgtggctcaacctcttcatctcctcacgcgacatcgccgtcttcgaccgcgccgtcctcaacggcatgctcgccgacggcgtctacgggcccatgctcatctaccccatgctcaagtccaagtgggacccggccacgtcagtggcgctgccgaatggcgagatcttctacctggtggcgctgctccgattctgccggccctaccccggtggtggcccgtcggtggacgagctggtggcgcataacaacg

SEQ ID NO: 42572 - DNA, 238 bp, Oryza sativa
  Clone ID: uC-osroM202020f01b1
ttcttagctgtgccatagctgtcctcctctccactccactcacctctccacctcccaagaactcccaaatcccaccccgcattgccatttccagctgttgttcttgattccttgttcttcggcgatcatttcggcttcttttttgtggtggtatgagagtttcgcgatgaggaaggaggtggtgttagtggccatggtggtggtggtggtggtgagctgggtcgttgctgccggcggc

SEQ ID NO: 42573 - DNA, 471 bp, Oryza sativa
  Clone ID: uC-osroM202020f04b1
tgttttggctcttctgcaaggactcaaaacaagggctccacacctcagcagatgggcatgaataacagaagacctacaactacaacaggatcagctgctcctacatatccgaataggatgtacccgagcacccggtcttacagccagtatggaaactcatacaaaactggtctttcgtacagcacaaatggttatggaagtaatggctatggtagtaatggatatgattccaggctatatggtcggcggggtcttagtatggataacaggtacaagccaagaggccgtggtaacgggtactatggttttggcaatgagagtcaggatggaacaattgagttgaacagaggtcctagatcaggccgttttaagaaccagaaattgtatggccatactgtcactattgctgtgaaagggcagagccttcctaaagtgacagcatgaatgctactgatgtacctgatagaacac

SEQ ID NO: 42574 - DNA, 437 bp, Oryza sativa
  Clone ID: uC-osroM202020f05b1
tttttctactccacctccgcctccgcctctctcagatccgtcgccgccgtcgccatgggccagtgcccctccgccccccgttaccaccaccatcgccacccacccagaaaccctcctcctccctccccaccccccgccgaccatgcgccgacgcagccgctgtccactcccgacgacgatgcccccgcggcggaggaccacaccgctgacctccccgacgacctcctcgccgtcgtcttcggcctcctcggctccgccgaccgcaagcgctgctccctcgtctgccgccgctggctctccgtcgacgccgtctcgcgcctccgcctcgccctcgacgcgcgggcgccggtccacgccgccctcccggggatccttgcccgcttccccgccgtcttcaagctcgccctcaagtgcgaccgccgcgcttagagcgtctc

SEQ ID NO: 42575 - DNA, 478 bp, Oryza sativa
  Clone ID: uC-osroM202020f06b1
ttatatatcgaaattgaaaagaactgtcttttctgtatactttccccgttctattgctaccgcgggtcttatgcaatcgatcggatcatatagatatcccttcaacacaacataggtcatcgaaaggatctcggacgactcaccaaagcacgaaagccagttagaaaatggattcctatttgaagagtgcctaaccgcatggataagctcacattaacccgtcaattttggatccaattcgggatttttcttgggaagtttcgggaagaaattggaatggaataatatagattcatacagaggaaaaggttctctattgatgcaaacgctgtacctagaggatagggatagaggaagagggaaaaatcgaaatgaaataaataaagaataaagcaaaaaaaaaataagtcgaagatagaagagcccagattccaaatgaagaaatggaaactcgaaaaggatccttctgattctcaaa

SEQ ID NO: 42576 - DNA, 458 bp, Oryza sativa
  Clone ID: uC-osroM202020f07b1
tttatcgccttccccatgttgtgatgggtgatagatcaggcaatattagatggtgggatgttacaacaggcctttcttcttcttttagcactcacagggaaggcatcaggaggattaaattttctcctgttgttcatggtgatcgaagtagagggcgcattgctgtgctgttctatgataatacattctcgatatttgacctggatagtgcagatcccttggcaaatgctcttcttcagccgcaatcacctggtacgcttgtcttggagcttgattggttgtcaacccgaacaaagaaggatgaaccgcttgtgttatgcatcgctggagctgatagtagtttccggctgattgaggttaacatcgatcctagggccagttctactttgaggccagtaactacaagagagaggtttaggccaatgccattgtgtctgccaatactatttccaacagca

SEQ ID NO: 42577 - DNA, 489 bp, Oryza sativa
  Clone ID: uC-osroM202020f10b1
cgagatctcgcatggtttgggagccagcaaattcacccgcgattccgcgcgccgccgccgtcgccgccgccgacgtcgccgcctgggtgggggaggagatggccggcctcgggaaggccttctacgcggtagggttctggatccgggagaccggccaggccctcgaccgcctcggctgccgcctccaggggaactactacttccacgagcagctctcaaggcatcgcacacttatgaacatctttgacaaaacccctcatgttcacagagatgcatttgttgccccaagtgcatctctcattggtgatattcaagttggacaaggagcttcaatttggtatggatgcgtcttaagaggggatgcaaacaacgttcaaattggatctgggaccaatatacaagacaattctcttgtccatgtggcaaaatctaatcttagtggaaaagtctttccaaccatcattggggataacgtcacagtaggtcata

SEQ ID NO: 42578 - DNA, 476 bp, Oryza sativa
  Clone ID: uC-osroM202020f11b1
tttttgagatcaaaattttcccgacaatgacaacgagcgattcgtcgaaatccttcgcagcggtggcggccaacgccagtgccaaaggtggagccggttcaggtcaaatgggcgatgccggtttcaagactcgtcaacgacctgatgccattcgcaattcgaacatcgttgctgcgaaagccgttgccgatgccgttcgaacaagtttgggaccgcgtggaatggacaagatgattcaaacgggaaacggcgatgtgacgatcaccaacgacggcgccactattctcaaacaaatgtcggtcattcatccggcatcgaagatgttggtcgaattatccaaagctcaagatatcgaagccggtgacggaacaacgaccgtcgtcgtgctggccggtagtttgctcgatgctgcgagtcgcctcgttgccaaaggtctccatccgacaaccattgtcgacgcctttgaaaaagccgcc

SEQ ID NO: 42579 - DNA, 471 bp, Oryza sativa
  Clone ID: uC-osroM202020f12b1
ttgttctcctcctctaatctcaagtctctgtctcgtcgtcctcgcatctccactcgccatgggcaagattaagatcggaatcaacggtttcggaaggatcgggaggctcgcggccagggtggccctccagagcgaggatgtcgagctcgtcgccgtcaacgaccccttcatcaccaccgactacatgacctacatgttcaagtacgataccgtgcacggccaatggaagcacagcgacatcaagatcaaggactccaagactctgctcttgggcgagaagccggtcaccgttttcggcatcaggaaccctgacgagattccgtgggctgaggctggtgctgagtatgtcgtggagtccaccggtgtcttcactgacaaggagaaggctgctgctcacttgaagggtggtgccaagaaggttgtcatctcagccccgagcaaagatgctccgatgtttgtctgcggtgtcaa

SEQ ID NO: 42580 - DNA, 469 bp, Oryza sativa
  Clone ID: uC-osroM202020g01b1
gtgtttgcttagcttagcttagctttgctgctgctccttctcattcataagccagcagctagctagcaagcagcacacacatatatcacaggccatctctctatccctaattaagctatatactccatatagctagctaaacacaggaggagtggaggaaggagaggctagctgatctagctatctgcagtgattagttaaaatgatggcttctgataggttggatgcagaaaggatcatagagtacttcaagggcaagagcatcctcatcactggagcaactggctttcttggcaagattcttgtggagaagatactgagggtgcagcctgatgtcaagaagatctacctgctcgttcgcgccatcgaccaagcatctgcaaaccaacgcgtccaatctgaggtgacggagacggagctgttcagcgtggtgaaggaaaagcacggcaagggattctcgcgattcatc

SEQ ID NO: 42581 - DNA, 468 bp, Oryza sativa
  Clone ID: uC-osroM202020g02b1
atctttctcccccctcccctttccgtttcccacccccctcaccgccgtaatcccgacacccctcgccggcgcacgcgagaagagtagtgctatctccggggtcggaggcgcgggggacgtgtgaactgctttgcgatcgccggcggcggtgctggtggtgttccgggctaggctgcgtcggccgatcggcgggcgggcgcacgcacgcacgcgtcgccattggcggcgagcagcgcgtccccacctttgctgctccgcgcgtttgccgacgcgatggaggcggcgggctactacaactgcaagaagaacgacggcggcatctgctggggcgtctgcggcggcagcgagcatggttcaaaggcaattctgagcatgtcaaggttgaagtgtgcgcttcgggggtttgatttgagggcacttctgatcctcttgattggagtgccagctctgatattcattatatatgtt

SEQ ID NO: 42582 - DNA, 471 bp, Oryza sativa
  Clone ID: uC-osroM202020g04b1
ttcatagtcagctcggaatatcatgctcatggagctcaagaagcttattgaggcaaacccactgtttcgggacaagctgaatttcccaccatttaaagtttcaagactccgcacattaatcaatcaaagtcttaactggcaacatcagctatgcaagaatcccagaccaaaccctgacatcaagacactgtttaccgatcattcttgtgccgctcctaccaatggagcaagagctcctccccctgctaatgggcctcttgttggaccaatccctaagtcagctgcatttcctccaatgggtgctcatgcgccatttcaacctgtggtgtcaccatctccaaatgcaattgcgggttggatgacaaatgcgaacccctctttgccacatgctgcagtcgcacaaggaccacctggtcttgttcaacctccaaacacagcggcatttctaaaacatccaaggactccaacaag

SEQ ID NO: 42583 - DNA, 473 bp, Oryza sativa
  Clone ID: uC-osroM202020g05b1
tttttacaaacccctctcactcccagatacctgctgctgccactagcccactaccatggatccttgcaagttccggccgtcgagctcgttcgacacgaagacgacgacgacgaacgcgggagctccggtgtggaacgacaacgaggcgctgacagtggggcccagggggccgatcctcctcgaggactaccacctgatcgagaaggtggcgcacttcgcccgggagcgcattccggagcgcgtggtccacgcccgcggcgcctacgccaagggcttctttgagtgcacccacgacgtcaccgacatcacctgcgccgacttcctccggtccccgggcgcccagacccccgtcattgtccgctttttcaccgtcatccacgagcgcggtagtccggagacgaaccgcgacccgcgcgggtttgccgtcaagttctacacccgcgagggcaactgtgacctccttggcaacaact

SEQ ID NO: 42584 - DNA, 444 bp, Oryza sativa
  Clone ID: uC-osroM202020g08b1
tttcgtgtccggcaagagcggggagaagaaggggagggagtcgccggagtccaaggcggtgataggcaaggccggggacgggaaccggatcgtgttcttcgagggcccggcattggcgttcgatttggaggacctgctccgcgcttccgccgaggttcttgggaagggcgcgttcggcacggcgtaccgggcggtgctggaggacgccaccacggtggtggtgaagaggctcaaggaggtgagcgccgggcgccgcgacttcgagcagcagatggagctcgtcggccggattcggcatgccaatgtggcggagctccgggcatactactactccaaggacgagaagctgcttgtctacgatttctatagccggggaagcgtatccaacatgctttacggaaagagaggggaggacagaccacctttgaactgggaaaccagggt

SEQ ID NO: 42585 - DNA, 405 bp, Oryza sativa
  Clone ID: uC-osroM202020g10b1
tgttcctccggctcttcttcagtatcgaatcctctcttctcctcgtgcccaccaccaccaccgtagcaatggcgggcaacgggccgatcaacaaggaggacccgctcaactggggcgcggcggcggccgagatggccggcagccacctcgacgaggtgaagcgcatggtggcgcagttccgcgagccgctggtcaagatccagggcgccaccctccgcgtcggccaggtggccgccgtcgcccaggccaaggacgccgccggcgtcgccgtcgagctcgacgaggaggcccgcccccgcgtcaaggccagcagcgagtggatcctcaactgcatcgcccacggcggcgacatctacggcgttaccaccggcttcggcggcacctaccaccgccgcaccaaggacg

SEQ ID NO: 42586 - DNA, 461 bp, Oryza sativa
  Clone ID: uC-osroM202020g11b1
tcgtttgatgcaatctcagctggaaagtactactattttgtccgtctgatgggtagaaaagcatctcacgtggcctttgaatgtgcacttcaatcacacccaaacatgcttatcttagcggaggaggtagcactatcaaaactcacactgatggaagttattaacaagatatgtgatggagtacaagcaagggcagaattagggaaattccatggtgtgctccttattccagaaggactaatagaaagcattccagaaatgtatgctctgcttcaggaaatcaatatcctccacaacaacaatgttcctgtggcagagatgccatcacaactgtctccttgggcagctgcgctgttccagttcttgccacccttcatcagaagagagctgctgctccatcaagaatcagacaactctgcccagctgtcccagattgatactgagcaattgttggcccactt

SEQ ID NO: 42587 - DNA, 402 bp, Oryza sativa
  Clone ID: uC-osroM202020g12b1
tcgtaatcatctacatccattcatccagttaagttgattttttaagctagctttgccggtgactgaagagaatttgttggttaattaaagtgaggatttcgccgggatcgatggaggggaggattagcagtgcaacgctggtggtggcagcggtgttggctatgctggtgctggtgccggcggcggcgctcgcctagcggttcgatgttggcgactcggcccggtgtacgtggggttacaactacaccgactgggttatcaagaatggccccttattacaaaacgacagccctgtgttcatgtacgaccctgcgaacgcgacgacgcacgcgcacagcgtgtacatgatgcgtaacgcgggggactaccagttatgctatactaaggctgcgaatctggttg

SEQ ID NO: 42588 - DNA, 457 bp, Oryza sativa
  Clone ID: uC-osroM202020h01b1
atcctgtgagctagcagaggcgccgtcgtggtcgccgtcgttcgtcctgctgcttccgccgcatcccgatccgccactgctgaacggggtgctttcgccatgtcgaggctgcgggcgctgtggcaagcctccgttaacgccaccaggcgagccattgtgtggaattcagaagacctaatcccaccaagtgaaaagtacatcttcaattttaattcaaaagatgagctgaaaaggtggcacttgtattcagattccgagtatggaggtttatcatctgcatcattggagataactgatggtggtgctggtggggatacttcatcaactggtctcttttctggcaatctctctttggatatgtctgagggatcaacatggaagataaggcgtagcggtttctgtggaatgagaacaaagaagtttaatggtttcattgatcttgatgcatatgatacta

SEQ ID NO: 42589 - DNA, 490 bp, Oryza sativa
  Clone ID: uC-osroM202020h02b1
tgatctggttgcatcctttcttttttcttgggctgggagagtgcgatgttggcatggttcaatcaaaccgggcaaacttatgcactagctaagcaagatgcagggatatgcagtatggttttgtttggtctgattgagccgtgccaatatcacaagcttgcctggcttaattacatgtagtagtgtgaggatattggattcttccacaaggtatgagaattgtcatgttgtgtatttgtgctcctttatgcgtgttatttcacatgcctgcctattagatttaagtttctttatgttgtttcatgcaaagctttcagaaactattttgtctgacggttcaagctttacagatttaagttttgctgctggtactagctggtcaaatggcactaaaaggtttaaaaccatgtgaatatttatgaatatcaatgtagtagtaacataaatcttactcctatcaaagaaaaatccctcatcagcagcacactaa

SEQ ID NO: 42590 - DNA, 414 bp, Oryza sativa
  Clone ID: uC-osroM202020h03b1
tatatttgtcagctcggaatatcatgctcatggagctcattatgcttattgaggcaaacccactgtttcgggacaagctgaatttcccaccatttaaagtttcaagactccgcacattaatcaatcaaagctcttaactggcaacatcagctatgcaagaatcccagaccaaaccctgacattaagacactgtttaccgatcattcttgtgccgctcctaccaatggagcaagagctcctccccctgctaatgggcctcttgttggaccaatccctaagtcagctgcatttccttcaatgggtgctcatgcgccatttaaacctgtggtgtcaccatatccaaatgcaattgcgggttggatgacaaatgcaaacccctctatttcacatgctgcagtcgaacaaggaccacct

SEQ ID NO: 42591 - DNA, 456 bp, Oryza sativa
  Clone ID: uC-osroM202020h06b1
tttctaccacggcttgagctcagcagcctggagggtcaccggagtagcgaaaatccagagagcagagatgagaaaaccgaagaggaggtagacgactgcccgatcgaggaggtgcggctgacggtgccgatcaccgacgacccggcattgccggcgctgacgttcaggacatggctgctggggctcatctcctgcgcgatgctggccttctccaaccagttcttcggctaccggcagaatccgctctacatctcgtcgctgtccgtgcagatcgtcgtcttgccgctgggcaagctgatggctgcttgcctccccaagaaggtgttcagggtgaagggcacggcatggtcgttctcgctcaacccggggccgttcaacctcaaggagcatgtgcttatcaccatctttgccaacaccggatccaacttcgtttacgccgtcgggattataaccatt

SEQ ID NO: 42592 - DNA, 388 bp, Oryza sativa
  Clone ID: uC-osroM202021a04b1
gcgctctcatatcacatctctgatcaatccttctgcgtgttcgtgaattgggaaattaatttggttttgagacaaatggaggcgacgtcgtcgtcgtcgtcgttgttgaacgggctgaactccggcgtggtgctgagcctgatcgcggtgctgtggacggtggtgtggcagaatctgcagcggctgcagctgtagacgctggtggtgcgggacatgaaccggcacgcgcggcggctggcggcgctagtctaaccgtacctgtcggtcaccattcacgagtacgagggccgaccgatgaaatgcagcgcggcgtacgaggaggtcaaggcctacctagcgcgtcgttactgcgcgacctgcgtcatctgcggaccgagggcgccaagga

SEQ ID NO: 42593 - DNA, 491 bp, Oryza sativa
  unsure (1)..(491): unsure at all n locations
  Clone ID: uC-osroM202021a05b1
ggtttctcctccccctcccggttcggttcggttcggttcgggtccggttcgatttcggtttttccttcggttcgggggttggtgggaaagcatggcggcgccggatgttgagtaccgctgcttcgtcggcggcctcgcctgggccaccgacgaccgctccctcgaagccgtcttctccacctacggcgagatcctcgagtccaagatcatcaacgatcgggagacggggaggtcgcgcgggttcgggttcgtgacgttctcgagcgagcaggccatgcgcgacgccatcgaggggatgaacggcaaggagctcgacggccgcaacatcaccgtcaacgaggcccagtcgcgccgctccggaggcggaggcggcggtggctacggccagcgcggcggaagcggaggctacngtggcggcggctacagtggtggtggcggcggcggtggctaccgccagcgccgtgaaggcggctacngcggtggcggtggct

SEQ ID NO: 42594 - DNA, 536 bp, Oryza sativa
  Clone ID: uC-osroM202021a06b1
gtttcttctccccggccgtgaaccgggacgagctgctacgcctgctgctgcacacaagctcaagtggccggccgagtcgtccgttcaccgcggcctactgcatctgccggcaaggagctcaaagatgagggctgcggggaagccgacgagcggcggcaggggagcgttgagcacgatcaacatccgtggcctactgcagcacttgctggagcacaaacgattgctggacgtgctactgtaggcagcgctggcgtagggcgcgcaggagcgggcgggcatggtgcacacagggagacagcgctcataatgcgctggagcgggagaggctgatgctcgagcaggcgtggacctagcgagaggagcaggcctgggtcagggaagaggcatgggctgagcggtgggacgagctattggacagctcgctggacacgctctggcacgatgatgaattgttgggatgatgtgagatgtctaactgaaacagagaaaggaccatgtctaggatcatagctagatgggaattcttttttctagat

SEQ ID NO: 42595 - DNA, 563 bp, Oryza sativa
  Clone ID: uC-osroM202021a07b1
ggctgacgcagaggacattcagccccttgtctgtgacaatggaaccggaatggtcaaggctgggtttgctggagatgatgctccccgtgctgttttcccgagtattgttggccgtccgcgacatacaggcgttatggttgggatgggacaaaaagatgcttatgtcggtgatgaggcccaatccaagaggggtatcctaaccttgaaataccccattgagcatggaattgtaagcaactgggatgacatggagaaaatttggcaccacacattctacaatgagcttcgtgtagcaccagaagagcatccaattcttcttacggaggctccacttaaccctaaggccaacagggagaagatgacacaaattatgtttgagacattcagcgttccagccatgtatgtcgctattcaagccgtgctttccctctatgctagtggacgtactactggtattgtcttggattctggagatggtgtcagtcacacagtcccaatctacgaaggttatgcccttgcgcatgccattctccgtcttgatcttgctggtagggatctgactg

SEQ ID NO: 42596 - DNA, 94 bp, Oryza sativa
  Clone ID: uC-osroM202021a09b1
tttttgacatagcaagcaagtacagtagctcatggggaagcaatataagctgtccgtggtcgttacaggtggtcgtgtgtaggatagtggagct

SEQ ID NO: 42597 - DNA, 525 bp, Oryza sativa
  Clone ID: uC-osroM202021a10b1
ttcacacgcattgcagaggagaggcgacaatggaggggaaggaggaggacgtgcggctgggggcgaacaggtactcggagaggcagccgatagggacggcggcgcagggcgccggggacgacaaggactacaaggagccgccgccggcgccgctgttcgagccaggggagctcaagtcgtggtctttctaccgggccgggatcgccgagttcgtcgccaccttcctcttgctctacatcaccatcctcaccgtcatgggggtctccaagtcctcctccaagtgcgccaccgtcggcatccagggcatcgcctggtccttcggaggcatgatcttagcgctcgtctactgcaccgtcggcatctccggaggacacatcaacccagcagttacttttgggctgttcttggccaggaagctgtccatgacccgggccatcttctacatagtgatgcaatgcctaagggccatctgcggagctggagttgtgaagggctttcagcagggtctgtacatgggcaatggcg

SEQ ID NO: 42598 - DNA, 463 bp, Oryza sativa
  Clone ID: uC-osroM202021a11b1
ttcacacgcgccgattccgaagaaatcaatcaaccaactactaggcgaaagcaagagcggatcgggtgctgcatttcgcggtcgttttcttcctctgaattctggtgtttgcggttgcggcaatggcgttggtggcggcagcggcggcgaatccgaagcagaaacagaagcagcagaaggcgtcgatcgggaggcgggcgtggcggctgctgcgcctggcggtgctctgggcgaggaagggcagcgcggtgcacagcctccgcctgctcagcaacctgcggcgcgccggcgtgggcctcggcgtcgtcggccgaggcgaccgcctggggtacggcgagcgggagtactcgatcgaggagacgccggcgttccggttccgcacgccgtcggcgcgggtgctccgtctaatcccctgcatcgcccccgccgtcccggacacgcccgggctctacggcgacgagga

SEQ ID NO: 42599 - DNA, 390 bp, Oryza sativa
  Clone ID: uC-osroM202021a12b1
cgaccttctcgatgcttcccaaatcctcctcctcgtgaactcgtcgccttcgtcttcgtctcgatctccatggcggactcgagcgcggcccgccccaccgtcctcgtcaccggcgccggcggccgcacaggaaacattgtctacaacaagctcaaggaaaggtctgaccagtttgttgtgagaggtttagtgagaacagaggaaagcaaacaaaagattggtggaggcaatgatgtttacattgccgacataagggacagagatcatcttgtgcctgctgttcaaggtgtcgatgcgctcataatcctcacgagtgctgtgccaaagatgaaacctggttttgaccctagaaaagtgggaggcctgagttttactatgaagatggaatgt

SEQ ID NO: 42600 - DNA, 574 bp, Oryza sativa
  Clone ID: uC-osroM202021b01b1
gcggtggcggtgaagcggcggcggcggtggcgcagaagaacggggggtggttcgggttcatctccgaggccttggaggtcgtgctcaaagtgctgaaggatggcctgtcagctgttcatgtgccgtactcttatggattcgccatcattcttctcactgttattgtgaaggctgcaacattacctttaacgaaacagcaggtcgaatcaactctggctatgcagaatttacagccacagatcaaagcaattcaacagagatacgcaggaaatcaggaaaggatacagcttgagactgctcggttatacaagcaagctggagtcaaccctctggcaggatgttttccaactttggcaacaatacctgtctggattggcctctaccaagccctttcaaatgtagcaaacgagggattactgacagaaggatttttctggattccatctttgggaggccctacaacaattgctgctcggcaagtggtgctggcatatcttggctcttgccctttgtggatggccatcctacattaggctggcatgacacgatatgttatcttgtgtgcctgtgctac

SEQ ID NO: 42601 - DNA, 449 bp, Oryza sativa
  Clone ID: uC-osroM202021b04b1
gtataagttagatcagaggagagctcagagctcaaagagttgggaagccatggcgggagggcagctcaacgtgctgagcacgctcgaccaggcgaagacgcaatggtaccacttcatggcgatcgtcatcgccggcatgggcttcttcaccgacgcctacgacctcttctgcatttccctcgtcaccaagctgctcggccgcatctactacaccgacgattccaaggacacccccggcgcgctcccgcccaacgtgtcggccgccgtcaccggcgtcgcgctctgcggcacgctcgccggccagcttttcttcggatggctcggcgacaagctcggacgcaagagcgtgtatggtttcacgctgattctgatggtcgtgtgctcggtcgcgtacgggctctcgttcgggagctcggacagggcgtcgtgtctacgctctgcttctttcg

SEQ ID NO: 42602 - DNA, 339 bp, Oryza sativa
  Clone ID: uC-osroM202021b05b1
gttttggtgagaacacaggagcgctcactgattaaagagctgggaagccatggcgcgtgggacactcaacgtgctaagctcgctctaccagtcacatacgcagcggatccactaaatgtgaaacggtatatacagcttgggctcctttacagtcgcctactagcttttgtgcatttacatggtgaccaagctgataggtcacagttactactacgaccatgctatggacacccgcggagcgctgccgctcaacgtgttgtgcgatatcaccagagtgtggctctggaatacgctccccggccaggtgacattcagatggatcggccacaagctcggacg

SEQ ID NO: 42603 - DNA, 490 bp, Oryza sativa
  Clone ID: uC-osroM202021b07b1
ctttccgccgcgagtcgcgaccatttcttgcgagtagtagtagaggggagagtgagtgaggggcgtgctgcaatggcgactgaggaggttgtccctgaggttccggtgaccgaggtggaggctgccgcggcggaggaggccgtcgaggagacgacggcggtggaggagaaggccgccaagccggcgaaggagaagaagaaggccggcaggccgccgaaggagaagaaggaggccaagccggcgaaggagaagaaggtgaaggaggccaaggccaagaagccccgcgtcgccgccgcccacccgccgtacgccgagatgatcatggaggcgatcgtggcgctgaaggagaggactggatcgagctcccaggccatcggcaagcacatccatgccaaccatggcgccaacctgccgcccaacttccgcaggctcctctccggcaacctcaagaagctcaccgcctgccgccaagctggccaaggtcaagaac

SEQ ID NO: 42604 - DNA, 519 bp, Oryza sativa
  Clone ID: uC-osroM202021b10b1
ctaactactccatttagctaagacccgtagtgtatagtagtcaagatcaatggcgtcccgacgccttgccccgctgctggtcctactgctctcgtccagcctcgccgccggccagagcaccggcgacaccgtcgtgttctggggccggaacacggaccagctcgaggggtccctccgtgaggcgtgcgacaccggcctctacaccaccgtcatcatctccttcctcagcgccttcggctacatcccgggcacctacaagctggacatctccggccacaccgtctccgccgtcggccccgacatcaagcactgccagtccaggggcatcctcgtcctcctcgccatcggcggccagggcggcgagtactccctgccgacctcccaggcggccgtcgacctcgaggactacctctggaacgccttcctcggcggcggacgccccggcgtcgcccgccccttcggcgacgtcgtcgtcgacggcatcgacttcttcatcgaccagggcgccacggagcacta

SEQ ID NO: 42605 - DNA, 307 bp, Oryza sativa
  Clone ID: uC-osroM202021b11b1
gttcttcttctggatgtatctgtcttggttacttgatctggagcttattagcggccatgtgcggcggaccaatcatctccgggttcatcccggcgtcagccgctgcggcagcggcggatgcggcggccaaaaagcatcagggcaagagggtcacgggcgacgtgctgtggccggagatgctgcggaaggggaaggcggtggcggctgacgaggactatgaggatcgcttccgcgagttcgagcgtggcatgagctacaaccaggccgtggggggcggcagccatgaagaggaggaccacaacgacat

SEQ ID NO: 42606 - DNA, 476 bp, Oryza sativa
  unsure (1)..(476): unsure at all n locations
  Clone ID: uC-osroM202021b12b1
atccaatcctccccccactatcggacagcgagatggtcatggagatcccgagctcgaagcgcgacatggcgcggggagcggaggacgacggcgaggaggaggaggaggaggagtacgaccgcgtgttctacgaggacatcgaggcgcccaagttcgtcgacctcaccgcccccgacgccgcccgcccctccgacgacccctcctggttctgcctccgcatcggttgtgaccagaaccacgagcatgtcgacccggaggcgctgcacaggagcttcttcatgcgggtcatggcagcgaggagccccaacgtgcggctgcagaaggcgatcaggaggaggaaccagagctcgatgctgaaatgcccgcactccgcgccgccgaagcctccaaggtcacggatcgcgaggctaagcacggcgacngaggccgcggcgaagcccaggctgaagacccaccggatttgcaccctgcgggcg

SEQ ID NO: 42607 - DNA, 517 bp, Oryza sativa
  Clone ID: uC-osroM202021c05b1
cttaagtactcccaggtcaacaaggccaaaagggccagtgagtggctagcttaattagctaagctcatagtcatagcaatggctggagccgtgctggtgaggagaatggtggtggtggttgccattgccgccttggtggcgcccggcgaggtggcggcgcagctgacgccgacgtactacgacggcagctgcccgagcctgcagtccatcgtgaggtcggccatggcggccgccgtgcagcaagagccccgcatgggcgcctccatcctccgcctcttcttccacgactgcttcgtcaatgggtgcgacgcgtcggtgctgctggacgactcgtcgacgatcaccggcgagaagaacgccgggccgaacgccaactcgctgcgcggattcgaggtcatcgactccatcaagtcgcaggtcgaggccgtctgccccggcaccgtctcctgcgccgacatcctcgccgtcgccggccgcgacggcgtcaacctgttgggtgggccgacctgggcggtgc

SEQ ID NO: 42608 - DNA, 593 bp, Oryza sativa
  Clone ID: uC-osroM202021c07b1
cttctacacctcattttccgcttgcatcttgctcattcagatctcttctgctttgagcaatggccaacctcaccgacctcgttaacctcaacctcagcgactgcagcgacaagatcatcgccgagtacatctggttggcaaacctcctctgcttttgatctgttcttgatttcttatattcgtctgcactagcaagtctcctgctgcactggtgcgttcttcaaggatgcaagatcgcgtttttttgtgcgaaattaatctccatttccctacctatgatcgtcgtggatcgtgaaaattgatgattgttcgcttcctgaattctaccactgatcaaacttttctaccaagtttctttgatacaacaacctgaatgatcttcctcgtctcaaaacgtcatcttttttatttctgttcagggttggaggatcgggcatagacctcaggagcaaagcgaggactgtgaaaggccccatcaccgatgtgagccagctgccgaagtggaactactacggctccagcaccgggcaggctcctcgcgaggacagcgaagtgatcctctacccttaagccattttcaaggacccgttcag

SEQ ID NO: 42609 - DNA, 405 bp, Oryza sativa
  Clone ID: uC-osroM202021c10b1
tttttcttccagaacttcgtgctcaagaacggtgaccagccggagtacattcacccgcactccgaccgctccgccgccgccgtgctcaccctgtgctacccggcgcggaaccactccccgtcgttcgtcatccagacgttcgacgaggacctgaccgtctccgcggtgtccgacgccgaggcggccgcggcggggcagaggcaccgggtcgccgagttcgacgacctttcagtcaccctcgacgtctcgccgtcgctcagggcgttccttgtcaggggctgcccctttgtcaccgtcgccaccgccgacgccgggggccccgtcgacatcttcgtcgcggtcgtccacgcctttatagaggtgggcttctgcgacgacgcgctaaccaagtggcggcttcggatg

SEQ ID NO: 42610 - DNA, 238 bp, Oryza sativa
  Clone ID: uC-osroM202021c12b1
tttgtcatggcgatgcaggccgccttcgccgcctcgatgttcccgcagctggcgcggtgggcgggaagcgatcgctcggtggttgtggcaccgccagcgccggtgccggcgaggttggggatgaggagcggtggggcggcggctgcggaggcgagaggggtgaggtgcatggcgagcctgatcgagccccacggggggaggctggtggagctggtggtgccggaggagggagggcggt

SEQ ID NO: 42611 - DNA, 494 bp, Oryza sativa
  Clone ID: uC-osroM202021d02b1
gtcttcactcacacgcattgcagaggagaggcgacaatggaggggaaggaggaggacgtgcggctgggggcgaacaggtactcggagaggcagccgatagggacggcggcgcagggcgccggggacgacaaggactacaaggagccgccgccggcgccgctgttcgagccaggggagctcaagtcgtggtctttctaccgggccgggatcgccgagttcgtcgccaccttcctcttcctctacatcaccatcctcaccgtcatgggggtctccaagtcctcctccaagtgcgccaccgtcggcatccagggcatcgcctggtccttcggaggcatgatcttcgcgctcgtctactgcaccgtcggcatcttcggaggacacatcaacccagcagttacttttgggctgttcttgcccaggaagctgtccctgaccccggccatcttctacatagtgatgcaatgcctaggggccatctgcggagctggagttgt

SEQ ID NO: 42612 - DNA, 453 bp, Oryza sativa
  Clone ID: uC-osroM202021d05b1
ggctcttcttcagtatcgaatcctctcttctcctcgtgcccaccaccaccaccgtagcaatggcgggcaacgggccgatcaacaaggaggacccgctcaactggggcgcggcggcggccgagatggccggcagccacctcgacgaggtgaagcgcatggtggcgcagttccgcgagccgctggtcaagatccagggcgccaccctccgcgtcggccaggtggccgccgtcgcccaggccaaggacgccgccggcgtcgccgtcgagctcgacgaggaggcccgcccccgcgtcaaggccagcagcgagtggatcctcaactgcatcgcccacggcggcgacatctacggcgtcaccaccggcttcggcggcacctaccaccgtcgtaccaaggacggtcccgccctccaagtcgagctcctcaagcatctcaacgccggaatcttcggcactg

SEQ ID NO: 42613 - DNA, 408 bp, Oryza sativa
  Clone ID: uC-osroM202021d06b1
cgttctccccaatccgatccagaattcctccgtcgcgaatcctcccttgtaccctgttcgatctcgtgcgcggcgcggagcggcggacgacgacgatgccaacggcggcggcgatggccggagggatggcgacggggccaggcagccgcgtgacgcggtacgccaagtcgacggcggcgtcggtgacgccggtccgccccggcaagacgcacgcgctgtcggcgctggacaacgccatggagcgccacgcggtgtacctggtgctctactaccgcgccgcgccggggctcgacagggagccgctcaaggagtcgctgtccgacgtgctgtcgcagtacccggccatgaccggccgcctcacgcgccccgtcgccgtcgtcgtcggtggaggtggagagggcgtgaggg

SEQ ID NO: 42614 - DNA, 571 bp, Oryza sativa
  Clone ID: uC-osroM202021d07b1
gcttgcgctactgcttggtctcactgtgtgaacaactgctgccgccgcctgccggcggtgtgctccggccgcgcgcggtcgtgatggctgcacggcgagcgaactgcgcgctggtgctggtgctggcgctcgcgctgttggcggcgcgggatgctggtgccgcggcggtgcccaagcccaactggctgggcgggctgagccgcgccgcgttccccaagcggttcgtgttcgggacggccacgtccgcgtaccaggtcgagggcatggcggcgtccggcggccgcgggccgtccatctgggacgccttcgcgcacaccccgggaaatgttgcaggaaatcagaatggagatgttgcgacagatcaatatcatcgctataaggaagatgttaatctcatgaaaagtttgaattttgatgcctaccggttttcaatctcatggtccaggatctttccagatggtgagggacgagttaaccaagaaggcgtagcatattacaacaattttataaactaccttctgcagaaggtatcactccttatgtcaatctttaacaactacgatctcctctt

SEQ ID NO: 42615 - DNA, 561 bp, Oryza sativa
  Clone ID: uC-osroM202021d09b1
gtgtcgccgcctccgccgccgccgccgcggctccccctcctccccacagccaagatgaatgttgacaagctcaagaagatggcaggtgctgtgcgcaccggggggaagggtagcgtgcgcagaaagaagaaggcagtccataagactacaaccacagatgacaaaagacttcagagcactctgaaaagagtaggagtaaacaccatccctggcattgaagaggttaacattttcaaggatgatgtggttattcagtttctgaatcctaaagtgcaagcttcaattggtgctaatacatgggttgtcagtggaactccacaaacaaagaagctgcaggatctgctgccatcaattatcaaccaacttggtcctgacaacttggataatctgcggaggcttgcagagcaattccaaaagcaggctcctggtgcttttggtgaagaggctggtgccagtgctggagctgctcagggtgacgatgatgatgttcctgagcttgtccctggtgagacatttgaggaggcagccagagagaaaaagggatcatgattttgttgcatg

SEQ ID NO: 42616 - DNA, 413 bp, Oryza sativa
  Clone ID: uC-osroM202021d11b1
ttgtttaaacaggaagaaactttgctgctgggatgagtggaggcattgcttatgtttatgatattgatgggaaattcagcgtccgctgtaaccatgagttagctgatctctatcatgtggaggaagaggaagacattaccacattgaaaatgatgattgaacaacatcgacttaacactgggagtgttgttgctagagatatactctctaattttgatactcttcttccaaaatttgtcaaggtattcccaagagaatctaagagggttttggacaatatgaaggctgaaaaggctgctgctaagcttgcaaaggaaccaaagatttcaaatggtgtttctgtaaccacttagaaagtgcaaccggagcaattaacaaaccgaccaacacgtgttttcaatgccaaaaagtac

SEQ ID NO: 42617 - DNA, 529 bp, Oryza sativa
  unsure (1)..(529): unsure at all n locations
  Clone ID: uC-osroM202021d12b1
tttcttaagtgtgtaaccaagtttgagacagaggcgaggtcgggtcagcaaggaagacggcgatgacggcgcgaagcatgttgcggaaccacccggaggcgtcggtgctcgacaccatccggcagcacctgctggaggagccgcgcggcggcggcggtggcgaggcggcggaggcgagcttcgggagcctggtggccgacatgtggagcgactcgctgccgttccgcgacgacgacgccgacgacatggtggtgttcggcgcgatgcgggacgcgttctcgtgcgggtggctgcccgacggcgtgttcgcggaggtgaagccggagcccctgctctcgccggactcgtcgtcgtacgacgggtcctcttgctgcttcggcttcgcggacgtgtcggagccggtgacgccgagcgacgccgcgttgggggcggcagaagcggccgccgtggcggcggcggcgacggccgagcacgggaaggaggaggaggccgtggctgcngtggccaaggggaagcactacaggggggt

SEQ ID NO: 42618 - DNA, 415 bp, Oryza sativa
  Clone ID: uC-osroM202021e01b1
ctttttcaaaaccccatttcattccaacctttcaaatccgccatcaccacctttttttccccacacacacacacacacacacacacacatatacacattgacacatagcagtagtgtgtgtagtactagtacaaacacacacaacacaagcttctctcttcccttcttggttttgcccaagaaacgaaaaccaaaaccaaacccaagaactctcctcaaaagaaccacctcacttcatagctctcacaaggctcacgcacacatagagcttgtgagagcttcttctttctctctctcttgaccttgtggtagctggtgcttaaaggaggaggaggtgaggaggaggcacaatgtctgagcagccattgtcgcagcctcggagcagaatgcgggaggcgctggagaaggaggacaa

SEQ ID NO: 42619 - DNA, 574 bp, Oryza sativa
  Clone ID: uC-osroM202021e02b1
gtcatatctggggtgacgctgcggtacatgatggagttcggggcgcgccccacggagaggaacctgctgcggtcggcgcagttcctgcgcagggagctccccatccgcatcgcccgccgcgcgctcgacctcgactccctccccttcggcctctccaccaagcccgccatcctcaaggtgagagattggtatttggactcattccgcgacttacggtgcttcccggaggtgaggaaccgggatgatgagcttgcattcaccgagatgatcaagatgattcgagtgcggcacaacaatgtggtgcccaccatggcgttgggtgtgcggcagctgaagaaagacctgggtggcacaaaggcctttccccctggcattgatgagatccatcagttcctcgaccgcttctacatgtcaaggattgggatccgcatgctgatagggcagcatgttgctttgcatgagcctgatccagaacctgggtgtattggactcataagcaaaagattattccccatgctggtggctcaacatgctactgaagatgcacgtgctttttgcatgagggaatatggat

SEQ ID NO: 42620 - DNA, 581 bp, Oryza sativa
  Clone ID: uC-osroM202021e05b1
ctcttgaccactctagcagtagtagtttggctacttgtctataggcgaagcaagaggaggagaagatcgcgtgaaggttccagtacttcagctaccgcgttagttccaccgctatggaaagtgttcaccagtgaagaacttagatcaatcacaaagaacttcagtgagggcaaccggcttcctgggaatgcaaagactggtggaacctatagcggaattttgccagatggatccagagtagcaatcaagaggctgaagagatcaagcctacaaaggaaaaaagatttctactctgagattgggagagttgcaaagctgtatcatcctaatttagttgcagtaaaaggatgttgttacgatcatggtgaccgctttattgtttatgagtttgttgccaatgggccgttggatgtttggctacatcatgtccctagaggagggcggtgccttgattggccaatgaggatgagagttgctacaactcttgcacaagggatcgcatttttgcatgacaagggtgaagccccaggtcgtgcaccgtgatatccgtgcaagcaacgtgcttctttgaccaggaattt

SEQ ID NO: 42621 - DNA, 475 bp, Oryza sativa
  Clone ID: uC-osroM202021f01b1
gtcgctttctgtctctcctccctttgcttgcatctgtagctagcagcagcttgatctggaatactccagccagctagctagctcggatcgatcgatcgggatgctgcctgggcgtgaagagatcgaggtgatgatcaggtgatccatcgatctatatgctgctgactagctgctgcatgcatgcctgccatcccgtctcttgaatcagcagataccgcatgcagagattgcaggaacagcttagatctgatccgaatatatatctggttcagtatcaagaaatcgagctacatatgaaaacttcatttctaagctccagcagctagcgtgatatgatagtgtgattgatatttgatactttcttgagagagacgcatacgatcgaatcggatgcactgcacctgagctaagctagctcaagctcgttcgatcagctcatgtacttgttgagcccaagaaatggcgacgaggagga

SEQ ID NO: 42622 - DNA, 510 bp, Oryza sativa
  Clone ID: uC-osroM202021f04b1
atcgatttcgattcgcttcgtttcgttctcgctgttgatttgttcgtgagatttgaattctagcaatggctcctctcggtgacggagcggcggcggcggcggcggcggagcccaacctggtggtgtcgttcggggagatgctgatcgacttcgtccccgacgtcgccggcgtctcgctggccgagtccggcggcttcgtcaaggctcccggcggcgcccccgccaacgtcgcctgcgccatctccaagctcggtggctcctccgccttcgtcggcaagtttggtgatgatgagttcgggcacatgctggtggacatcctgaagaagaacggggtgaacgcggaggggtgcctgttcgacgagcacgcgcgcacggcgctggcgttcgtgaccttgaaaagcaacggcgagcgcgagttcatgttctaccggaacccgagcgccgacatgctcctgacggaggcggagctcaacctggacctgatccggcgcgccaagatcttccactacg

SEQ ID NO: 42623 - DNA, 516 bp, Oryza sativa
  unsure (1)..(516): unsure at all n locations
  Clone ID: uC-osroM202021f05b1
ggaacatttgcctcatgttcatcaccgggatgttcgtcaatggtccttatgccctaatcacaactgcagtgtcagctgaccttggcactcacagctcattgaatggaaattcccgggcattggctactgtgacagccatcattgacgggaccgggtctgttggcgccgccattgggccattgctgacaggctacatctcgtcgagtagttggagcgctgtgttcacgatgcttatggcagcagctctccttgctgggctcctcttgacacaacttgtgtgcagtgaactaaaaggaaaggcgacctccaatgcgagcaaggatgtcgccgatgctcaaggtacctactcagatgaggtgtaagactgtaagtaagatctagtcgcaccccaagacacgatacatggattagattctcgtagctccaaagcactgcttggcaagaagttgcattttattgcttnctgcacatgtcttgatcacctctggtttgaggctgaaataaccaaagagatgt

SEQ ID NO: 42624 - DNA, 507 bp, Oryza sativa
  Clone ID: uC-osroM202021f06b1
cagtgtcgcggcgctcctcctcctcctccggctccgatccccatggcgttcatgcgttcccactccaatgcattctccggtatgggggttgctcctgacatcagggacacattccttgagcttcagatgaagaaagcatttcgctatgttatcttcaaaatcgaggaaaagcaaaagcaagttgttgtggagaagaccggggcaacaactgagagttatgatgatttcctggcatctctcccagaaaatgactgcagatatgccctctatgattttgactttgttactggggagaatgtgcaaaagagcaagattttcttcatcgcctggtctccatcaacatcccggatccgtgctaagatgctgtactccacctccaaggatcgcatcaagcaagaacttgatggattccactacgagatccaggcaaccgacccaactgaggtagaccttgaggtcctctcggagcgggcttattaaagccctggccctgatgaacgatcacct

SEQ ID NO: 42625 - DNA, 557 bp, Oryza sativa
  Clone ID: uC-osroM202021f08b1
ggttgtgaaacaccagacaagatatctttaaaattgtgccaaactcgggaagcaacagtaagctttacattacacaggctacatgaaaagacagcattggtaatcacttcaactgccgcacatttacaattccaagatatgatgcattacagtaactgatgtctgatggacactccacaattgtgaaggagaattgcaataccagtgtaccaccatagcagaaaacaagaatcacccttgtctgttcagtccttcgtagttttggagcaaaagataattgcgttacgtagttagttccccaagccaagttccctgggctgttagttggcattctattgtcattgacaacagcgtgggaagaaatgactgtcattcctggagcctccagccaagttccttgcattgctgttcatcaggctgcagagtattcggtatggcaccaaaaacacaacgggccgtttcaaacccagaaatcgcattatgaaaaaatgccgacgcctactccatgttcttgcttcagtcatctggagatatatacatgaaatactggggagagg

SEQ ID NO: 42626 - DNA, 573 bp, Oryza sativa
  Clone ID: uC-osroM202021f10b1
ctcgccttcctttccccaactaaaccctaactcctcgccgccgcctccgcctccgcctcctcgtcggagcagcgagccgctgctccttctcctccaccaccagccatggcgacccagatcagcaagaagaagaagttcgtgagcgatggcgtgttctacgcggagctgaacgagatgctgacgcgggagctggccgaggacggctactccggcgtggaggtgcgcgtgacgccgatgcgcacggagatcatcatccgggccacgaggacgcagaacgtgctcggcgagaaggggcgcaggatcagggagctcacctccgtcgtgcagaagcgcttcaacttccccgagaacggcgtcgagctctacgccgagaaggtcgtcaaccgcggcctctgcgccatcgcccaggccgagtccctccgctacaagcttcttggaggcctcgccgtccgcagggcttgctatggtgttcttcgctatggtatggagagtggtgccaagggttgcgaggtcattgtaagtggaaagctcagggcccaagagccaagccatgaagttcaggatggtacatga

SEQ ID NO: 42627 - DNA, 552 bp, Oryza sativa
  Clone ID: uC-osroM202021f11b1
gtctatcaaatgggcttctggtgctttacattgccataaacttgttcaagatgtactatggcgatgattgggagggtctctttgagtccatcactggctatggccttggtggatcctcaatggctctgtttggaagggtgggtggaggtatctacaccaaggcggctgacgtcggtgctgatcttgttggcaaagttgaaaggaacatccctgaagatgatcctcggaaccctgctgtgattgctgacaatgttggagacaacgttggtgatattgctggaatgggatcagatctgttcgggtcgtacgctgaatcttcctgtgctgcccttgttgttgcttccatttcttcctttgggatcaaccatgatttcactgggatgtgctacccgctgctggtcagcttcatgggcatcattgtctgcttgatcaccactctttttgccactgacttcttcgagatcaaggccgtgaaagaatctaaccgtcactaaagagccgcttatcatttctacggctttgatgactgttggtattgactggtcattggtt

SEQ ID NO: 42628 - DNA, 409 bp, Oryza sativa
  Clone ID: uC-osroM202021g01b1
gatgattttgaggatttttttttcgaggtggttttgtttgcctctagtgtttatttctttcctctctctttcacttggcagatccaagaaacaccgaaattttgcttgattttgccgcggattttttacttttttaatctgatctgatccgagagaatccaaagaattttttgatccaagaaaaagagaagagaagggaatttcttgctgtgtgcgggcgccatggccatggggctgaaccgattcacccaatggctgtggccggcgagcacggcgcgcgcggcggcggcggcggcgactacgcacgagctccccaccaccggcgacggcctgacgagcgcctgcttcccggactttccttccgggttccgggagccggacaccgtcacgttcgcggcgaccacgcgcc

SEQ ID NO: 42629 - DNA, 469 bp, Oryza sativa
  Clone ID: uC-osroM202021g02b1
atttttcttcgcccatgtttaccggggcaactcccaggttattgacataggctactcccacgaaacggtttcaagtccggaggagtaattgcgttgtggatcctatttcgatagcgaaacgattgctctcgtctatggaccacgcgaggctatcaacttatggccccaatgtggcggctgctggcgatctacaagccggggctttggccttctcagctaggaattcgtcacactctgctcccttgacagtgaagttcatcacaagtgcctacaataatgtgttcagcgggctcttaaaccgtcacaagcacgtcttgtcgccctgatggacatgtctgcacaccattgtcaactggataaacagacttgggcaccgttcatataggttctgcgagctatcaggaagctcgggccatacgtgctgaaatgacccgggattaaagcctcaaaatgcatttgtgggatttcc

SEQ ID NO: 42630 - DNA, 446 bp, Oryza sativa
  Clone ID: uC-osroM202021g04b1
ctgtctctcgttcgcgcaaagcacgctgcttttctccgctttgcgagcaccatagcctagcccaccatgtgcggcggcgccatcctctccgacctcatcccgccgccgcggcgggtcaccgccggcgacctctggctggagaagaccaagaagcagcagcagcagaagaagaagaacaagggcgcgaggaggctgccactgcgccaagaggaggaggatgatttcgaggccgacttcgaggagttcgaggtggattccggcgagtgggaggtggagtccgacgccgacgagggcaagccgctcgccgcgccccggagcggcttcgctaaaggtggattgaaaaacactacctgtgctggtgctgatgggcctgcagcaggtctgcttaaagggagagaaagaacccattcaggggtattcgccagcggccatggggcaaatgggct

SEQ ID NO: 42631 - DNA, 531 bp, Oryza sativa
  Clone ID: uC-osroM202021g05b1
gttcattgggctagtggtgcgatatctagggttcagcattttgaaattattgcattagataggattctagatgattctctagaatccatgatcgaggagcacactactgatgatttggtagacatggctgagcaggagaaaatgcaccttgaggatactaagagtgcgctggaagaatctgctggagactgtacaggatccttgcgcaaagccactgctttcctcttttccaagacagcatttaattttctgacaaatgtggcttctagtttgtttggtgctcatgattcaacatcttccagctcggtcaatgcagattctcagtatcaaattgtgacgacagcagaactgcagccatctgcagaagatatctctgaagagaaacagaccatggagctgataacacagtttgagaagccaacattagcttcagaaaatgccatgacaaaaggatttgatgttgtgaccgactgttctgatcaccactttgtcaaagaaattggtcacgaacatgtcaaaagaggttgggtg

SEQ ID NO: 42632 - DNA, 532 bp, Oryza sativa
  Clone ID: uC-osroM202021g07b1
cattctcccaaaacacccacccggtttaccagagatccgcgcccgccacttgtaaacctgctgcacccatggcgcccagagcagctacggtggagaaggttgctgtggcgccacccaccgggcttggtcttggcgtcggcggaggtgtcggagccgggggtcctcactacaggggcgtccgcaagcgcccgtgggggcgttacgcagcggagatccgtgaccctgccaagaagagccgggtgtggctcggtacctacgacacggcagaggaggccgtccgcgcctacgacgccgtcgctcgagagttccggggtgccaaggcaaaaacaaactttccgtttgcatcacagtcgatggtcggctgtggcggcagccccagcagcaatagcacggtagacaccggtggcggcggggttcagacgcctatgcgggccatgcctctgccgacgactctggacttggatttgttccaccgcgcggctgctgtgactgcagtcgccggcaccggcgttcgctttcctttcagaggata

SEQ ID NO: 42633 - DNA, 436 bp, Oryza sativa
  Clone ID: uC-osroM202021g08b1
tcttctctgtactatgcctgtttcttcagacattctccactgccttaggagcaaatttcttcactgcgtccccgacagtcaggaatatcttgtcttcaccgatgagatccgtgaatttcgctgatcggagcttcaggatcacagctggccccggattggctagaatcagctgaggaatgccaggaaggatgctccgatcaatatcgtctgccagttccactgcagcagcaaccaagctagcatcagttgtacccaatactggtttccatcaaagaatgatgaagaagcaataagttcttaaaggaatgatattattttgtcctaccccatggtgaacatttccccagactgatttcatgaccgagatgatgtcagtcttcttggtgaaagttgcaattcaaggaagcctttaagctgctgaagggcaatggtgatg

SEQ ID NO: 42634 - DNA, 462 bp, Oryza sativa
  Clone ID: uC-osroM202021g09b1
tatttcctcttcttcttcttcttgttcttgttcttgtgtcctgactgttcttgataaagctcagatttgggaattggaccacatcataacattctttggcagagtttgtgaaggtacatttggagtttggattaatttcaggtggttagctgttcttgatcgttcttcttgttgttggttgctggaagattcgaagattttttttgtgtgtgtgtgtaaattgtggtgttcttgtttggcattgttgctcagttagttgatcatggcgagccgggaggagagcggcaatggcggtggcggtggcgcgactcctgcggcggattaccggagctcggacagccggagctcgagccggcggagcacgcggttcaaggaggacaacgagtacgtggagatcacgctcgacgtcaagggcgacgacacggtcgccattcagagcatccgcaacggcgccgacatgcc

SEQ ID NO: 42635 - DNA, 487 bp, Oryza sativa
  Clone ID: uC-osroM202021g10b1
ttttgtcaaatgatgggcaaatacatgatatttctttgggaattgtaacgaatttaccgagccaatctaaagactacaataacagtcggaagcaactgaaagtgcagtttgataatagtacaattcatcccacaaagatagaagcccctcggtgcctggaaaattctaagaagcctgatattctggaacatgacaggaaaaatgtcaagaataacactgcccaagaaattgtgccaccggtccagacttcaaaaccttgtgcctcgcataggccatcttcaaacacactggcgtagtgtaataatactgccgcagaaactgtgaaaggaactggagaacatgagaatctttccctcgttaataaaaatggtaccccctcgaagacatggaagagaagcaatacccatgtctacatgtgtcatcttatccaaatgcatttggacaaagagaaggcattacataaccgggtaaaacctgaggaagtttg

SEQ ID NO: 42636 - DNA, 544 bp, Oryza sativa
  unsure (1)..(544): unsure at all n locations
  Clone ID: uC-osroM202021g11b1
ttctttgtcaaatgatgggcaaatacatgatatttctttgggaattgtaacgaatttaccgagccaatctaaagactacaataacagtcggaagcaactgaaagtgcagtttgataatagtacaattcatcccacaaagatagaagcccctcggtgcctggaaaattctaagaagcctgatattctggaacatgacaggaaaaatgtcaagaataacactgcccaagaaattgtgccaccggtccagacttcaaaaccttgtgcctcgcataggccatcttcaaacacactggcgtcgtgtaataatactgccgcagaaactgtgaaaggaactggagaacatgagaatctttccctcgttaataaaaatggtaccccctcgaagacatggaagagaagcattacccatgtctacatgtgtcatctcatccaaatgcatttggacaaagagaaggcatcacataaccgggtaaaacctgaggaagtttgtcacagtcacattttaaggtcttcagacggttctaccatangtaagaatggtgca

SEQ ID NO: 42637 - DNA, 471 bp, Oryza sativa
  Clone ID: uC-osroM202021h02b1
atttgtcaaatcattcctggcttcaaaaccgatgcaggttgctgtttatcactgcttgcataatggtttggagtctgctattcatgcttctcttcagctaatctcaagagcttgtctactggatgcttctttctgtgctatgatttgtggcccaataaatccatcatccaatgtcaatgaagtagaacatggtggagatggaacaattgtatctgacatgttttctctattgtcactgtgtggctcatatttgaataaggagtccaagcaaaacagtaatcagaaatgcaggctatccaatcctcatgccctagtagtgcactgttgccttgcactggcaacaatagctgcatgcctgaagtcagaagggaattcttcagcatcaattatcttaacgagttcccagaagaaacagcggtcccgactttctgttcttgcgcatctctctttagttgatgatacagtcaagag

SEQ ID NO: 42638 - DNA, 410 bp, Oryza sativa
  Clone ID: uC-osroM202021h03b1
gccctttgcaggcatggcgttatctgtggagaagtgggtaggtttcgggtcagccatggctggcgtcggcttgctttggtcccgaatgccggagcacgtccatgaggaggctaggcacatcatcggtagcttggtccccatggtgatgtcctactttaacccctacgagcagatcaccgtgtccgagtacggcgaagagcggttccggcggaacaagatgttcgacgccgtctccacctacctgatcagcgcgtgcttggagagcgcatgcaagctcaaagccgagctggggggcaacaacagttgcgacgacccgcgtgtgattctagaagagaaccatgaagtcttcgactgcttcgagggtgcccgcatgtggtggaagctgtgccccaggtctctagaacaggggg

SEQ ID NO: 42639 - DNA, 445 bp, Oryza sativa
  unsure (1)..(445): unsure at all n locations
  Clone ID: uC-osroM202021h04b1
ctgaattccgttcaccgccgtgtttttcgttcgttctgtttcttggtgttcttgaagagttcctgaaattgagtcatggctgccaagctagctcgcctccacagtctccgcgaacgcctcggtgccaccttctcgtctcatcccaatgagttgattgcactcttctctaggtatgttaaccagggaaagggaatgctccagcgtcaccagctgcttgcggagttcgatgccttgatcgaagctgacaaagagaaatatgctccctttgaagacattctccgggctgctcaggaagccattgtgctgccgccctgggttgcactggccatcaggccaaggcctggtgtctgggactacattccggtgaatgtaagtgagttggcagtggaagagcttagtgtttctgagtacttggcattcaagaacagctngttgatggacacac

SEQ ID NO: 42640 - DNA, 376 bp, Oryza sativa
  Clone ID: uC-osroM202021h05b1
gcctatcagcacgagcacacgagaaaacaagagaaaaaaagcagcagcggccatggagggatacgaccgcgagttctaccagttcagcgaccagctgcggctgcagacggcgagcttctccggcctctccctcggcgactccatctggtcctccccctccgaccgccgcaacgagccggccttcgacggcgagtaccaccacttctcctccccctcccccgccaagaacgccatcgccaacatcaacggcgtcgtcggaaacctggatggcccgggcctcatcggctccggcaagctcgccttcggcgccaccaaagccgaccgctacaacagcgtcaacctcccccgtcgacaacaacaaccaccacaagttcta

SEQ ID NO: 42641 - DNA, 389 bp, Oryza sativa
  Clone ID: uC-osroM202021h06b1
ccacgcgatccattctacagctctagcgccccccgcgtccagttccatctaatcagcttctcgtcgagatgggccgcaagttcttcgttggtggcaactggaaatgcaatgggaccactgatcaggtggacaaaattgtgaaaattctgaatgagggacagatggcttctacagatgtccatgaggtgggtgtcagcccgtcttatgtgttgcttgctggggccaaaagaaaattgtgcacgctgatacaagttggtgtgtcaaattgcatactgaataaaggccgtgctcttaccactgatgtaccacctgtcatgcttggcaactcatatggatccctgggatattcttggacactctgtaaagaggagcttgctgggtgcattaaa

SEQ ID NO: 42642 - DNA, 520 bp, Oryza sativa
  Clone ID: uC-osroM202021h07b1
tggtgttcgtccactcgcgctcgcactcccgtcgttacgcgcgcgcgcgccgccgccgccccgacctcgccgcgcgcgccgactaacctagatgcggtgatgggaagaaggggcgcgggcgcgggcgctgcggtggtggtggtcgcggccttcgtggcggcggccgtggcgtcgggggacacgctcgccgatctcggcggcgccgccaaggggatcgacagcgtgccagaagtgaataacttgggaccatgggcgaaggggcttctgaaagggatgccggactcggcggcagggccagcagagggccccatcgcaaagtatccgctggttctggcagaggagaggacgcggcggccggatgttcttgaccaccttaggatgtatggaggagggtggaacatcacttacaagcactattgggcggctgtttcattcacaggaattgctgggtgtgttcttgctgctgggtggtttaatttcgcttggaattgctgtagctgcaagctgcttttggaaatca

SEQ ID NO: 42643 - DNA, 500 bp, Oryza sativa
  Clone ID: uC-osroM202021h08b1
gtttattcaacctactaagctagctagctagtgacaattaagtgatcacaagtgttgttgcgatgggtagagtagtggtcgtcgtggcggcggcggcggtagccgtggccgtcgtcgtgctgctgggcgcggcggcgccggcggcgagcgcgatggagttcggcgacaaggacgtggcgtcggaggaggcgctgtgggagctgtacgagcggtgtcgcgggcagcaccgggtggcgcgggacctcggcgagaaggcgcggcggttcaacgtgttcaaggacaacgtccgcctcatccacgagttcaaccgccgcgacgagccctacaagctccgcctcaaccgcttcggcgacatgaccgccgacgagttccgtcgcgcctacgcctcctaccgcgtctcccaccaccgaatgttccgcggtcgcggcgagaggcgcagtggcttcatgtacgccggcgcccgcgacctgccggcggcggtggactggcgcgagaagggc

SEQ ID NO: 42644 - DNA, 418 bp, Oryza sativa
  Clone ID: uC-osroM202022a04b1
ctctgcactttcacccccaacattgtcaccaggtgcatcgaaccgagtctgcaatgcacttgcacttcttcagtgtgttgcatctcaccctgagaccaggatccttttcttaactgctcatattcccctgtacctgtacccattcttgaatactaccagcaagacaagaccttttgaatacctgcgactcaccagcctgggtgtcatcggtgcacttgttaaggttgatgatactgaagttatcagttttctgctgcaaactgaaataattcctctgtgtttgcgtaccatggaaatgggaagtgagctgtcaaaaactgtatgtcgctaaccatctcatgtttatctaaataccatcatctttttcttctttaagtatgtgatgatgctgtctgaagtttgtgtgtaattttttttt

SEQ ID NO: 42645 - DNA, 376 bp, Oryza sativa
  Clone ID: uC-osroM202022a07b1
ttttgccacacacacaccactccatttctgagctcttctagtttgagtgagagagcagcagaagggagtagtgcaagatgccgatccgcaacatcgccgtggggagccaccaggaggtgtaccacccgggtgcactcaaggcggcgttggccgagttcatctccaccctcatcttcgtcttcgccggccagggctccggcatggccttcagcaagctgaccggcggcggagcgacgacccccgccgggctgatcgcggcggcggtggcccacgccttcgccctgttcgtggcggtgtccgacggcgccaacatctccggcggccacgtgaacccggccgtgacctttggcgccttcgtcggcggcaacatcaccct

SEQ ID NO: 42646 - DNA, 147 bp, Oryza sativa
  Clone ID: uC-osroM202022a09b1
atcggccgtcctttctcttaaccctttgttcatcttcttgttcctccttttgtctcgtcttgatggccggtgatggtccgatcaggcaggactgggagcctgtggtggtgcggaagaaggctctcaccgccgccgccaagaaggatg

SEQ ID NO: 42647 - DNA, 195 bp, Oryza sativa
  Clone ID: uC-osroM202022a11b1
tttctagatcgcgagcggctctttgtgagagtgagcctctcgccattgttgcctcgataagaagcttaattagctcggaagccttttcacttttcagccatgaggctgtcgtccctgctgttcttggtgtgcttcttcactgtcgccatgtcgcaattgcgcggcggcggcgaaggcgaggcactttaggtggga

SEQ ID NO: 42648 - DNA, 337 bp, Oryza sativa
  Clone ID: uC-osroM202022a12b1
atcgcctcccagaggcatgcctggctcatgcaatctccttcaccactcccacggacgcctgccgctgctccgccgtctccgccgacttccaagcagcggcgagctccaacgccgtgtgggagcgcttcctgccgccggactaccactccatcctcgctcgagccgacgatcctgtggatttcaccacttccaacaaggagctcttcctcagcctctcccaggaccacgtacttctggaccaacgcagcaagagtttttggttggaaagaacaagcggagctttatgctacttgctatcatccagatcattagagatagcatggggggaagatgcccg

SEQ ID NO: 42649 - DNA, 376 bp, Oryza sativa
  Clone ID: uC-osroM202022b01b1
gtttcatcttattgtcacttccatctcattctcctaattgtcatcactagcttctagctagcttaattaattaattagccatggcggaggagaagcaccaccaccacctgttccaccacaagaaggacgacgagccggccaccggagtagactcctacggcgagggcgtctacacgtcggagacggtgaccaccgaggtggtcgccggcggccaggacgagtacgagaggtacaagaaggaggagaagcagcacaagcacaagcagcacctccgcgaggcccgcgccctcgccgacggcgccttcgtcctgtatgagaagcacgaggcgaaagaaagacccggagaacgcgcacaggcaccaagatcaccgaggaa

SEQ ID NO: 42650 - DNA, 337 bp, Oryza sativa
  Clone ID: uC-osroM202022b03b1
agttaacgcgtgcgatccaagcagaccgagtcgacgaagcagcgaagcaaagcagcagcagcagcgagcgagcgcgcgcggccgccgccggtgaggcgaagatgtcgtggcaggcgtacgtcgacgaccacctgatgtgcgagattgacggcaaccacctcaccgccgccgccatcgtcggccacgacggcagcgtctgggcgcagtcccccaacttcccgcagtacaagcctgaggagattactggcatcatgaaggactttgatgaacccggcagtctcgcaccaactggtctttttcttgggggcacaaaatacatggtgatccaaggtgaacc

SEQ ID NO: 42651 - DNA, 373 bp, Oryza sativa
  Clone ID: uC-osroM202022b04b1
agtctacccaacaaaaagaaaaagaattttcaggttttcttctcgctttcaccggagaaggagaaggagaggaaggtgttgatcgaatcctcctccaatcgcgcgcgattcgatccccgttgctggctcgctcgctccgccgatccctcatccgatctgaatccccgatctgatggcggccaaccccggcaacaagatccgcaacgccaagctggttcttcttggagatgtgggcacgggcaagtcgagccttgttctccggtttgtgaagggccagtttgttgagttccaggagtccaccatcggcgcggccttcttttcgcagaccttggcggttaacgacgagacggtgaagttcgaaatctgggatact

SEQ ID NO: 42652 - DNA, 121 bp, Oryza sativa
  Clone ID: uC-osroM202022b07b1
tgtattggctaagattgatttccccggagccaagccggtgagcgacgcggtggccaagtccggcacgacgccgctcttcccggcgatcgccttcatcctggagaaggtcgcgcctttcgtt

SEQ ID NO: 42653 - DNA, 392 bp, Oryza sativa
  Clone ID: uC-osroM202022b10b1
ttcaccaccaccaccgtctccagccatggcctcctccgcctccctgcagcgcttcctccccccgtacccccacgcggcagcatcccgctgccgccctcccggcgtccgcgcccgccccgtgcagtcgtcgacggtgtccgcaccgtcctcctcgactccggcggcggacgaggccgtgtcggcggagcggctggagccgcgggtggagcagcgggagggccggtactgggtgctcaaggagaagtaccggacggggctgaacccgcaagagaaggtgaagctggggaaggagcccatgtcattgttcatggagggcggcatcaaggagctcgcccagatgcccatggaggagatcgaggccgacaagcttttcaaggaggacatcgacgtgc

SEQ ID NO: 42654 - DNA, 522 bp, Oryza sativa
  Clone ID: uC-osroM202022b12b1
ttatataccaaaaataaggaattatacttattatttatataaacatgctactaatcattcatcgtaaacaagcgattcattaatatttatatttcttgatgtccatgtagccaatcttatgtggaagaatgaagagtcacgcattgaatatgacaaaatcattaagatgataggttgttggattgaaatatgcgttgcaaaaataaaattttcagatttagaaatatgactatcaaaagtagatgaatggagttaattaaacagaaagagcgtactgaacgcttatcaatgataaagggctccatttaatgctccatttcctcgaaaaaaataatgcttcatttactcgaaaaaataatgctccatttatgtgcaaaaatgaactaatagtaatggaatctcaaaaaattacccattgcgttgaactattctaagcaaatattttttttcctaaaaagttgtgtttcccagagagagttagagtgtgatagagagagagataatgatagagagagagagttt

SEQ ID NO: 42655 - DNA, 273 bp, Oryza sativa
  Clone ID: uC-osroM202022c01b1
tcgtttttactgagaacgccccctttcctttccccctcctctcgttggaggcggccggggaagctggtgggcatatggagtgcgcggcgaaggggctggtggcggagccgtgtgccggcgaggcccgccggcgctgcggcggttgcggcgccgtcgactactgctcgcgcgcccaccagactgtgcattggggatttcattaaagaagaatgcgcaaggctcgcagagcagatgagccgcatcgatatgctgaaacaatttccattcacgttc

SEQ ID NO: 42656 - DNA, 324 bp, Oryza sativa
  Clone ID: uC-osroM202022c02b1
tcttctcctccggctcttcttcagtatcgaatcctctcttctcctcgtgcccaccaccaccaccgtagcaatggcgggcaacgggccgatcaacaaggaggacccgctcaactggggcgcggcggcggccgagatggccggcagccacctcgacgaggtgaagcgcatggtggcgcagttccgcgagccgctggtcaagatccagggcgccaccctccgcgtcgggcaggtggccgacgtcgcccaggccaaggacgccgccggcgtcgccgttgagctcgacgaggaggcccgcccccgctttaagggcaacagcgagtggat

SEQ ID NO: 42657 - DNA, 223 bp, Oryza sativa
  Clone ID: uC-osroM202022c03b1
gttttacattaagaaggggggagaagtggaggaggaggtggcgcgcaagggagaggagaggaaggaggaagaggtggtggtggaggagaagagccatcatcttcatcttcagccaggtgaggaggagcttgtcgtcctctcgctcgccggctgcttgcccaaagtttttccattgccagcccttcaccttatccttctcatcttacaattttctatggtggat

SEQ ID NO: 42658 - DNA, 428 bp, Oryza sativa
  Clone ID: uC-osroM202022c04b1
ttcctcctcccaaactttatccgccgccgccggcgtactcgagagaaacatcagcatccatggcgggcaagggcgagggtccggccatcggcatcgaccttggcacgacctactcgtgcgtgggcgtttggcagcacgaccgcgtggagatcatcgccaacgaccagggcaaccgcaccaccccctcctacgtcggcttcaccgactccgagaggctcatcggagatgctgccaagaaccaggtcgccatgaaccccatcaacaccgtcttcgatgccaagcgtctcattggcaggaggtttagcgatgcttctgttcaaagtgacattaagctctggcccttcaaggtgattgctggacctggtgacaagcctatgattgttgtccagtacaagggtgaggagaagcagtttgctggcgaagagatc

SEQ ID NO: 42659 - DNA, 415 bp, Oryza sativa
  Clone ID: uC-osroM202022c05b1
cttcgttgcacacgcgcgcgctgtggttgctgcatcaaatgggtaacttgcttgatatgaaggtggtggcaatggtggcggcgctagtcgtcatgagcttggcaggggtgtccatggcggcacggagggtgcccgcgctgctgaagagccacgtcggcgacgggatctcctaccacggcggcgccgtgctcggcggcgacattcccgtcaccctcgtgtggtacgggaagttcaagccggcgcagaaggccatcgtcgtcgactttctcctctccctcacggccacgccaccgaacgcgacgacgccctcggccgcgcagtggtggggcgccatcgccgccggctacctgtcgtccaacgcgacgaacgtgacgactgcggcgcgggtggttcttgcgaaccagaccttcgacga

SEQ ID NO: 42660 - DNA, 345 bp, Oryza sativa
  Clone ID: uC-osroM202022c06b1
atcttctccgcttctcctcctctcctctccctctccgcctttcccaaacctccccaaatcccccaatcccaatgccctcccagtcccatccctagctcgctccaccccaatcccccacccccaccatggccctctcctcccgcgccgccgccttcccccacatctccctcccctcccctcgcccccgcgtctccctccgcccgccacccccggccccgcgctccctgcgcctcgaccgcgtcgtcgccgacaccaccgccgagctgggcctcgatggcggcggcggcggcgggctgctcgccgccgccatcgagcacctcgagcgggagccggcgttcgcggggg

SEQ ID NO: 42661 - DNA, 463 bp, Oryza sativa
  Clone ID: uC-osroM202022c08b1
tcagctcttgttgtcagcagcacaagctggacaccagatgaagatttcagcatacttctggaagcagcacttatgtacgatagacgtgttgctgcaactttaggagaagatgattcaatggacgagggaaagctttggattgatatcaagaacgggaagcaatttgtctacccaagactgctattcattatcactggcaaaggacctgataggatgaagtatgaggagcaaataaagaggttgaaactgaggcgtgttgccttccggactatgtggcttgcatcagaggactaccctcttttgcttggatcggctgatctaggtgtatcattgcatactttctcttcagggctagacctacctatgaaggtggttgatatgttcggttgtggattaccagtttgtgctgtttaatctcctgcattgatgagctttgaaaaataaataataatggacttttttt

SEQ ID NO: 42662 - DNA, 308 bp, Oryza sativa
  Clone ID: uC-osroM202022c09b1
gtatcccttccggatctatcagccccgtcaccaaccttcttccatccacgcttccatctaaagatcggagcaggatgatgggcgatttcctctccagggtcctactgttggcctttggttatgcttatcctgcttatgaatgctataaaaccgtagagctgaacaagcccgagattgagaagcttattttctggtgtcaatattggatattagtcgcgctactgacggttttggaacgatttggtgattttgcaatatcatggctaccactgtactcagaagcaaagctgatgttctttatatactta

SEQ ID NO: 42663 - DNA, 314 bp, Oryza sativa
  Clone ID: uC-osroM202022c10b1
tttcaaatgggtggttctcgtgtcaggacttttctgtgccttcatgttcgtctccattgttgcgtacgcacggcacaagggcctcgtcgggtcgtgaaccttgcccaaactgtaaatttgagctagagcaaccttgcgtatgattaatctcttgtaccaaaattcatcagtataaaattgggatgatgaaaaagaacaataaataggaaaaaaaaagagtaaattccaaagagataaaggataaaaataaaattataatgacctgaaagctaaaaaagaaacaaaaaaaaggagtaattgatgaagccaatttt

SEQ ID NO: 42664 - DNA, 474 bp, Oryza sativa
  Clone ID: uC-osroM202022c11b1
caccgctgccgcctccttctacgcctccgccgatccccatccatccatccggcgagcgagcgagcgaggagggtcgccgtcgctcgccctgctgcttccgccgcatccgttccctacttatattattttgaagagatgggttgatctccaaggggccggaacctcccagctcgttgacgtggatcatcttcatcttctagtgatttaccttcctgctgctggaagatgaaaggaacatgcgagcaaaatgatatagcattggtctctgagaaaaaagaatggaaaggagcttcttgcccagtttgcctggagcatccacatgatgctgacctcctcctctgtacttctcaccacaaggggttgccggccctatatgtgtggtaccaaccaccagcattctaactgccttgaacacttcaaagaagcttacgccaaggagaagttggcccacagtgttttaattgagtctttacc

SEQ ID NO: 42665 - DNA, 419 bp, Oryza sativa
  Clone ID: uC-osroM202022d02b1
gttttacacccagttcactcctcattatattacatggtattgccctgaagcttttgttgtgagcaagcagtgcaaatcacagtgtatcaatcatgggaggtattgtgcaccagacccagagcaggatttcagccagggatatgatggaaaagatgttgtggttcaaaatctacatcaaatttgtgtattcaaggctgctaatgagagtgggaagccatggttgtggtgggactatgtgcatgacttctcaattaggtgccctatgaaggagaagaaatacacacctgaatgtgctgttcatgttattaagtcactcgggttggatgttgagaagataaagaagtgttgtggagatccctgagctgatgaggaaaacccttgtttgaaggcaaaacaagatgcccaaattggtcatgata

SEQ ID NO: 42666 - DNA, 436 bp, Oryza sativa
  Clone ID: uC-osroM202022d05b1
ctcatcccagccgccgccgccgcagcctcctcctctcgtcttctccttcgagttgttagctccctccttattcaaccatgggtaaggagaagacgcacatcaacattgtggtcattggccacgtcgactccggcaagtcgaccaccacgggccatctgatctacaagcttggaggtatcgacaagcgtgtgatcgagaggttcgagaaggaagccgctgagatgaacaagaggtccttcaagtacgcgtgggtgctcgacaagctcaaggccgagcgtgagagaggtatcaccattgatatcgccctgtggaagttcgagaccaccaagtactactgcacggtcatcgatgcccctggtcaccgtgacttcatcaagaacatgatcacgggtacctccaagctgactgtgccgtgctcatcattgactccaccact

SEQ ID NO: 42667 - DNA, 493 bp, Oryza sativa
  Clone ID: uC-osroM202022d07b1
gttgagggtttgatgaccactgtccatgcaatcactgcaactcagaagaccgttgatggaccctcgagcaaggactggaggggtggaagggctgccagtttcaacatcatccctagcagcactggagctgcaaaggctgtcggcaaggtgcttcctgctctcaatggaaagttgactggtatggctttccgtgttccaaccgtggatgtctctgtcgttgatttgactgtcaggcttgagaagccagcatcctatgatcagattaaggcagctatcaaggaggagtctgaggggaaactcaagggtattctgggttacgttgaggaggaccttgtttccacagacttccagggtgacaacaggtcaagcatctttgatgcaaaggccggtattgctctcaatgaacactttgttaagcttgtgtcttggtatgacaacgaatggggaaacagctcttgcgttgttgacctgatccgtcacattgtacaacacc

SEQ ID NO: 42668 - DNA, 458 bp, Oryza sativa
  Clone ID: uC-osroM202022d08b1
cttaaccttctcttctctcaaccctttgttcatcttcttgttcctcctcttgtctcgtctcgatggccgggattggtccgatcaggcaggactgggagccggtggtggtgcggaagaaggcgcccaccgccgccgccaagaaggatgagaaggccgtcaacgccgcccgccgctccggcgccgagatcgagaccatgaagaagtataacgctggaacgaacaaggcggcgtcaagtggcacatccctcaacaccaagcggctggatgacgacaccgagagccttgcccatgagcgtgtctcaagtgacctgaagaaaaacctcatgcaagcaaggctggacaagaagatgacccaagcacagcttgcacagatgatcaatgagaagccccaagtgatccaagagtacgagtcaggtaaagctattccgaaccagcagatcatcgggaagcttgaaagg

SEQ ID NO: 42669 - DNA, 440 bp, Oryza sativa
  Clone ID: uC-osroM202022d09b1
gtttttcaactgtaattttctatgaaatatcaaaaaaccataaaccaaattttagatttgccaatatagaaacccaaaatgtaattatactgcttataaggctaagtacaagcctgattcaagtatgctttgctacaaggtaatcaaacaaggagtactggttactgaggtttaaaaccttatagcaaatttgaatggttggcatctactgatctgtaaatgatgaaagttatacatgtgaaatatttatcaatgactagttgcctactgcttgcactttttaccttgttgtagtatattttctaggaatatatggctacttatttttacttcagttccctttttctcttattgcaagcattgaccattctttgacttctgttgttcttttcagtaatgccccttatctttggagcgatgttctaaggctttattcaact

SEQ ID NO: 42670 - DNA, 429 bp, Oryza sativa
  Clone ID: uC-osroM202022e02b1
cattcatccaccgtctcaatctcggtagtaatcctcgcggcctcgccgttagttccaccaccgggcgccaccatgtgcgggatcctggccgtgctcggcgccgccgactggtcgcaggcgaagagggctcacgtcctctcctgctcccgcaggctgaagcacaggggacccgactggtccgggttgtaccagtgcgagggaaactttctcgctcagcagcgtctcgccatcgtctccccgctctccggcgaccagccgctgtacaacgcggaccggaccatcgtcgtcgtggccaatggagagatctacaaccacaagatgatcaggaagcagttcgccttcaagcacacgttcagcacctgcagcgactgcgaggtcatcatccccgtgtatgaggagtacggcgaggactttcgcgacatgctggac

SEQ ID NO: 42671 - DNA, 356 bp, Oryza sativa
  Clone ID: uC-osroM202022e03b1
tctttgtcttcttccatctccaaatccttcttccctaatccccctcgccggcgaagcgcggcggcggcggcggcgccttcttccctaatcccctcgccagcggggagccgcagggcggcggaggcgtgcgtcggctgctgctgctgcgcgggcgggggaggtggggagagatgcacagatccgcgggcgccacgatggcgtggaacgtgttcaggttctgcactgcgctgagggggctgggctccatcatgatcctgctcgtcctctccatcgtcggggtcacctactacgcgggcgtggtgtacaactacggccccgcgctcttcggcggcggcgccagcacccttcttgcgctc

SEQ ID NO: 42672 - DNA, 243 bp, Oryza sativa
  Clone ID: uC-osroM202022e04b1
ctttttactcttctcctccccacattcccaaagagaagcttcgcggcctcctcctccgctccgctctccacgcgtcctcctcctcctccacctcctccgcatcctcctccgagcccccagatccgccgcgcgtgctctcgcgggtggtggtgcttctggtcttgggggaggggaggggcgcgagcgagcgagcgaacgagcgagagagagagagagagagagaggaaggggagggagagggag

SEQ ID NO: 42673 - DNA, 425 bp, Oryza sativa
  Clone ID: uC-osroM202022e05b1
tctccctcccacgccgtcgcccccgcaaaccctagcgaacgcagcggagagaggagagagcgccatggccgtggaggtggcgacgcagaagatcaggtggggagagctcgaggaggacgacgagggggacctcgacttcctgctcccgccgcgcgtggtctccgggcccgacgagaatgggttcaagaaggtggtcgagtatcgcttcgacgacaaggggaacaaggtgaaggtcaccaggaccttccgcgtccgcaagatcgcccgcgcccgcctcttcaagagcgccatcgagcgccgctcgtggcccaagttcggcgacgccgtgcaggaggacgtctgcgcgcggctcaccatggtgtccaacgaggagatcgttcttgagcgcccacgcgccccaaggagcaaagctgaagaaccagtgc

SEQ ID NO: 42674 - DNA, 407 bp, Oryza sativa
  Clone ID: uC-osroM202022e06b1
atcgccgccgtcgccgccgccgtctccgccgccgccgaggagtatgagtagtaggaggaggaagccggtagccggaggaggagcggggagatggcggacgcgaagcagcagcagcagcagcagacggcggcggccgccacgggggtctggaagacggtgaagccctttcttaacggcggggcctccgggatgctcgccacctgcgtcatccagcccatcgacatggtcaaggtgaagatccagctgggagagggatctgcagctcaggtcacaaagaacatgcttgctaatgagggtattggttccttttacaagggtttgtcagctggtttactaaggcaggcgacatatactactgctcgtcttggatccttcagggttcttgccaacaaagcatttgaaagaat

SEQ ID NO: 42675 - DNA, 451 bp, Oryza sativa
  Clone ID: uC-osroM202022e10b1
ttctgaagcgagtattgagtcttccgtccatatgttctaagcgtttcttaaccacaaaagttgacaggtgtgtgacaggtcttgttgcacaacagcagacagttggacctctccaacttcctctcgcagatgtggctgtgattgcacagacatatactgacttgacaggtggtgcctgtgccattggagaacaaccagcaaaaggtttacttaatcccaaggccatggcaagacttgctgttggggaggccttgactaatctggtctgggctaaagtttcatcactttctgatgtcaaagcaagtggtaactggatgtatgctgcaaagcttgatggagaaggtgcagatatgtatgatgctgctgttgcattggctgactgcatgattcaacttggtattgcaatcgatggggggaaaggacagtcttttcatggcagctcaatgtgatg

SEQ ID NO: 42676 - DNA, 375 bp, Oryza sativa
  Clone ID: uC-osroM202022e11b1
ttaaaataggggggaagagagatttccctcgcgcgcttgtcgttcgccttcttcccctttgcggatttgaatccgctcgggggcgctattacctattggcgccgcggcggcggcggcggcgatttgagtcgggatcccgctcgatggcggagggcttcgggcggtgggaggcggatccgctcttccccgccgccgagtgcgtgcaggacttcgccgacaggatggagggtgtgtaccgcttgctcttgcatgaaagacaacctgaaccaagatgataccttacatacaaaacgttgtgtattaattgcagtatgagagaaatgtgtgcacttgttctggaacaacaaagttggcagtggagcaatttgagccgag

SEQ ID NO: 42677 - DNA, 432 bp, Oryza sativa
  Clone ID: uC-osroM202022e12b1
gtaattgctcctcttgttgactttgttggaaacaccattcaattcccaccaacttacagacctgtaaagtatggttttgctggtcttcctcaagctaatggagaagtcagtccaagtcttcttgcaagttattataacattgaatcaaacacttgtcaaactgattccagtactatgtcagtctttgaagctcttgctcaaagttactccccaactgatttaacttctttccaaaccaagttcagcattcctcaacaagctgtcgcaaaggttgttggaccaaactctggaaacttttgcaagagtaacccaaataactgtgttgaagctggtcttgatgttcaatggattattgctgttgctcaaggttgtcctctttggttctggtctattagtggaaacggtgatatctttctttgaaggattcttgct

SEQ ID NO: 42678 - DNA, 85 bp, Oryza sativa
  Clone ID: uC-osroM202022f01b1
tgtttgtgtcgtcactcgttggggtgtcacccggctttctcgcaagacccacaggggtcttccgaagggttgtttgtttggtgcc

SEQ ID NO: 42679 - DNA, 500 bp, Oryza sativa
  Clone ID: uC-osroM202022f05b1
ctttaccaccccctccagatcccccgccccgatcccctccccgccgccttcgacgccgcctcgtccgtccaggagcgcgccaaggacatcctcgtcgtcgtctccggcctcctcttcggcttcggctgcggcgccctcaccgtcgcgaccatgtacctcgtctggtccctcctcgcctccacctgcgctccttcctacgacgaggtctacggcgaagacgacgacgacgagcttgtcgactccgagagccccaagaaggccggataccgtattattcacgacgccgaacagtacgtcggcggtaagaactaggggtggggaattgtgctatcttgccgatggcccatttaaaattttgtgataaatgatcgcgtggatttgcggggtatatatactactattagcacctatatatgtgttgcgtttgtctgactagtatgtgggggtgatttccaaaagaaacaaattttgattacggtcctgatgttttttacattatt

SEQ ID NO: 42680 - DNA, 466 bp, Oryza sativa
  unsure (1)..(466): unsure at all n locations
  Clone ID: uC-osroM202022f06b1
atttgtcaaaccaaattaccaacaaagtccacctctcccttgctagggtttgttccctctcccaatctccaaagtgtcatttcacattgacttcattcttcttcccagatcccccaatttctccctttcaccatgaagcttctccctcttctcatcctcgcaatggtcatggccaacgccttcggcgccgtcacttctcgcacggcgccgggggaggaggcgctgctggcgcacggcgtggtgaagacgacgacggcggaggggacgtccatcgacaaccaccacgcgataccgcggccggagtacgacagctggagcagcccggggaacattgccgggagtggccatgacattgggagcgaacaagctcagccatgatcgagctagatgcaacttacccagctctacccatgtcctgtacgtatatacatagcangcttgccagccatgggttatacacttatta

SEQ ID NO: 42681 - DNA, 359 bp, Oryza sativa
  Clone ID: uC-osroM202022f08b1
gttccttccactcagctttgctcttcaccttcaacaacacctatcaacatggcaatgctgctgaggaaggccgctgtggcccctgccaggaccagcgtgcgcagcaaggctgccatcgagtggtacggccccgaccgccccaagttcctgggcccattcagcgagggtgacacccccgcctacctgaccggtgagttccccggtgactacggatgggacactgctggcctgtccgccgatccccagaccttcgccaagtacagggagatcgaggtgatccacgcccgctgggccatgctcggcgccctgggctgcatcacccctgagctgctggccaagaacggcatcctcttcggtga

SEQ ID NO: 42682 - DNA, 429 bp, Oryza sativa
  Clone ID: uC-osroM202022f09b1
tttctcctcctctcgccttctcccgtcttctccttcgagttagctacctccttattcaaccatgggtaaggagaagacgcacatcaacatcgtggtcattggccacgtcgactccggcaagtcgaccaccacgggccatctgatttacaagcttggaggtatcgacaagcgtgtgatcgagaggttcgagaaggaagccgctgagatgaacaagaggtccttcaagtacgcgtgggtgcttgacaagctcaaggccgagcgtgagagaggtatcaccatcgatattgccctgtggaagttcgagaccaccaagtactactgcacggtcatcgatgcccctggtcaccgtgacttcatcaagacatgatcacgggtaccttccaggctgactgtgccgtgctcattattgactccaccactggtgggttt

SEQ ID NO: 42683 - DNA, 310 bp, Oryza sativa
  Clone ID: uC-osroM202022f12b1
gttcgacgacgacttccccacggccagagttcccctctttccccttcccaatcctccgatctcatcccccggctccggcgacgcggcggggcgatgcgtagctgctgagcgcgcggcgccacgaccccccccacctcgagagcgcggccatggacgagggctacgccaacctccccaccagccacctcctcggctccgtccccgccgccttgacccccgaagagaggaagccctcacccgtcgccgaagttggcacctcgcgtctgcagcagtttcctcctgctcttggtggtactggtggtgttggtgg

SEQ ID NO: 42684 - DNA, 60 bp, Oryza sativa
  Clone ID: uC-osroM202022g01b1
gttatattccacgagcacgctcgcttggaggggtgggatgcgcatagaagctaccccttt

SEQ ID NO: 42685 - DNA, 295 bp, Oryza sativa
  Clone ID: uC-osroM202022g03b1
gatggtcgccctcgccacaccggtgtcatggtcggaatgggccagaaggacgcctacgtcggcgacgaggcgcagtccaagaggggtatcttgaccctcaagtaccccatcgagcatggtatcgtcagcaactgggatgatatggagaagatctggcatgacaccttctacaacgagcttcgtgtggccccggaggagcaccccgtcctcctcaccgaggcttctttcaaccccaaggccaatcgtgagatgatgacccagatcatgtttgagacctttaacacccctgctatgt

SEQ ID NO: 42686 - DNA, 392 bp, Oryza sativa
  Clone ID: uC-osroM202022g04b1
ctttccgactagagcagctgacgagtgaggtgcgtgcgagtttcctcaagttccacatccggctggtgggcaaggtgctgggagagttcccgcccaaggggctcacgcggctgtcggagaaggtgcccttggcgttgggggccaaccccaacggagcggcaaggccagggggcaaaccggacgcaagcagggcatgggtggacaactcacaagctccgcaggggggggagcccaccaccaacgtggtgttcatcctgcacctggaggacgagaaggccatgcacggggcgagggagacgctgcgcaccaccgtgctgaggcagcaggccgcgcataggttgggagaggacgcggagatggtgccctacctgggctttttcctcctggaacct

SEQ ID NO: 42687 - DNA, 399 bp, Oryza sativa
  Clone ID: uC-osroM202022g06b1
ctttcttctccagatcaaaagacccttgctttccctcaggatcggccatggcgaccgccgttgcgtcccaggttgctgtctctgctccggctggctcggatcgcggcttgaggagttctgggatccagggtagcaacaatattagctttagcaacaaatcatgggttggcaccacattggcgtgggagagcaaggccacgcgaccgaggcatgcgaacaaggtgctctgcatgtcagttcagcaagcgagcgaaagcaaggttgctgtcaagccttttgatttggagagtgctaacgagccgccgctcaacacatacaaaccaaaggagccttacaccgccacaattgtctcggttgagaggatccgaggccccaaggctccaggagagacatgccaca

SEQ ID NO: 42688 - DNA, 473 bp, Oryza sativa
  Clone ID: uC-osroM202022g08b1
tttgccagaggtaatgaaatgtatcctgttgccaagccaagcaagtgttttgatatattccttaacctatttgatttcttaagtaatgatgccagaaaatgggtctggggtagttttagtcacctggaaaaggagtacaagaaagagcttcagggtggttctttggacaagtttcatctcatcaacaaatacatccccaccttttcatcactggttcagcttaaatcccaaatggacatggtacagtttattgttggccctggtggtagtatcttgtccattgttgaggaagaggcatctagtatgattgcttatgcactattgatatctgagcaacaaggaatatattcggaagctgcaattgtaaaggatgaagttattgctggtagaaaaattgataaagtaacaccaatcaactcgatcggagatacttctgtgccatctgcaatttatcttcaaatgattctttagaa

SEQ ID NO: 42689 - DNA, 312 bp, Oryza sativa
  Clone ID: uC-osroM202022g12b1
ttttagctagctatagctagaagcctagcacatgaacccggcgccgtcgagggcgccgcagcggcagcagcgcggaggggagatgtcggcgcgctacggcggcgggctgcagttcttcgctgacgccccgccggcgggggtggaggggggcgccgcgaccgcgcggacgttctttccggtgccgggcgggggaggggagcagcagccgccggagcgcgcgatgaggcagcagcactacggcggcggcgggagtggtgcggccgagatctcgctggggcacggacaccgtcaccgcggcaagcaccattttca

SEQ ID NO: 42690 - DNA, 430 bp, Oryza sativa
  Clone ID: uC-osroM202022h01b1
actcttcaccaccacctcacctcacccacctctgcttcttcttcttcttcttccccgtggtgtggtgtggtggtgaattgttgttctgttcccttcatttttcgttgattcgtgagcgcggcgacgtacgtacggtggtaagcatcgtcgtggattcgtctccggcgacgggggggagtgggtagggtagggatgttctctaaggactgggactgaggtgatcggcttaatgtcccgccagaacgagtcggacctcttctggttttaccttttcctctttggttcttttcttgaaaagacttcacgccgcgcccatttccagaccgagcgggagcccactttttcattcgcgctgaaaatgggttcgggttgctttaacttgtgaactcggggggatttttggtttttggttttgttttggggttggttg

SEQ ID NO: 42691 - DNA, 395 bp, Oryza sativa
  Clone ID: uC-osroM202022h05b1
tgatgaaggagttcttatctgagctggctaagcgcgtcaacaagaacaccactgcttatgagaactacaagaggatcttcgtgcctgagggccagccgctggagagcgagccgaatgagccgctgcgcgttaatgtgctcttcaagcacgtccagaagatgctgaacagtgacagtgctgtgattgccgagactggtgactcctggttcaattgccagaagctgaagctccctgagggctgcgggtatgaattccaaatgcagtatggttccattggatggtcagtgggtgcattgctcggatatgctcaaggcgctaaggacaagcgtgtgattgcctgtattggtgatgggagtttccaggtgacggcacaggatgtgtcaacaatgattcgc

SEQ ID NO: 42692 - DNA, 121 bp, Oryza sativa
  Clone ID: uC-osroM202022h08b1
tatctgcgccaaaccaaccacccaccatccaccggtcgaacacttggcgctctcgcccgccttagctcgctctgttcgtggcgctcgacccgaacaagaacggacatggtttccatgaacg

SEQ ID NO: 42693 - DNA, 356 bp, Oryza sativa
  Clone ID: uC-osroM202022h10b1
ttaacccttgcgaggttgccagagctccgctgccttgtgctgcgtttgcatgagaccgaattggttagcataaagattcatactgaagatgttggctactttcggaagttgagaatcttaaggatacttggtacatctatctggtttgatctgcacggcagcaagtgcaacatcacagacaatagaagcttagcatctattatcatgccaagtcttgaattcctcgagtttgctgtccatatgcggttcctgaaagatgcaacccaacttggttttgacaagctgcttagcttcgagaagcttggaagaagttcgcttcagaaagtcaccataatactgaaatgtggagatgcccg

SEQ ID NO: 42694 - DNA, 381 bp, Oryza sativa
  Clone ID: uC-osroM202022h11b1
ggtaaacaaggcacaaacacaacagccaccgttacaaagagctagctagcttggttagttaggcgagtagtggctgcagtgccctgcgcaggcatggcgttatctgtggagaagtgggtaggtttcgggtcagccatggctggcgtcggcttgctttggtcccgaatgccggagcacgtccatgaggaggctaggcacatcatcggtagcttggtccccatggtgatgtcctactttaacccctacgagcagatcaccgtgtccgagtacggcgaagagcggttccggcggaacaagatgttcgacgccgtcttcacctacctgatcagcgcgtgcttggagagcgcaagcaagctcaaagccgagcttgggggcaacaac

SEQ ID NO: 42695 - DNA, 394 bp, Oryza sativa
  Clone ID: uC-osroM202023a01b1
gcttgtcgaggagatggcgagcggccgcaccgcgcgggactgcgcgtacatgagtacaggtacccagcgtctgcgccgctgatcgacgcggcggagctggggtcgaggacgctggaccgatccgtgatgggcgagttcatcgacacgctgatgttcctgcacatcaccgtggacacggtgatcggttacaagcaccagacggacgcgtcggcctccggcgccgacacggcgtgcggcggcgtgggcgtgctcggcatcgcgtgggcgttcggcggcatgatcttcatcctggtctactgcaccgccggcatctccggcgggcacatcaacccggcggtgacgttcgggctcttcctggcgcgcaaggtgtccctggtccgcgccatgctctaca

SEQ ID NO: 42696 - DNA, 508 bp, Oryza sativa
  Clone ID: uC-osroM202023a02b1
cgttcgtacaatatcctgtcccggtccggccggggtagctgctgcaaattcagcaattgcttggcacatcgagttgattgatcgaggtcgatcgaggctagctaagctgcgtccaatggcgttctcacgggctacggcggcggccgtcgtcgctctcgtcgtcctgctgccgcatttggtcgccgccgtcgtcctcgacgtcggcggcggcgtcgcggcgaggccgtgccactcggcgtccgtggacggcgacgccgggtgcctgagctggcgggtcatggtggaggcgaacaacgccagggggtggcgcacggtgcccgcggcgcgcgtcgcctacgtcaggggctacatgacgcgggggcagtacggcagggacctgagcagcgtcatggaccaggtcgccgcctacgtcgacaccgtcgaggccgacggcgacggcctcgacgcatggatcctcgacatcgacgacacatgcctttccaacctgctctactacgaggccaagcag

SEQ ID NO: 42697 - DNA, 485 bp, Oryza sativa
  Clone ID: uC-osroM202023a03b1
cactcacgagcaacaacggacccaaacaccaaagggacaaaacaaacccctacaaaaataacaggaaagaaaaacgaaccaccagacaaaaccaaacattccttgttctaaaattcatcacataaaaacatacgcacaccgagaaagacaaaagacttgaaactataacaacacgctcggaaaaagcaaagaaaagaaaaaacaagtgagaaagaaaagctacatttatcctgcgtatattccaacgtcaaagcaactatggtatcgagaaaaaagaaaacgaaagaagaccattctccttatcgcagatccgcccgaaggaaagaaaccgtatccccattaaaaaaaccccgatgcgactcatccagcagcggcagctgatgcctgatgatggacatgagcatgggcatgggcgtgaggataaatgcctcgcacgttcgccgacggccgcggatagtctccggccacgccgacgcccgacagca

SEQ ID NO: 42698 - DNA, 475 bp, Oryza sativa
  Clone ID: uC-osroM202023a04b1
atccaaaccttcgtcttcgtcttcctctcgccggggattcgattcgatccgatccgatccaaggggaggggaagcaatggcgacgaagaggagcgtggggacgctgggggaggcggatctgagggggaagaaggtgttcgtgcgggccgacctcaacgtgccgctcgacgacgcccagaagatcaccgacgacacccgcatccgcgcgtccgtgcccactgtcaagttcctcctcgagaagggcgccaaggtcatcctcgccagccatctgggccgtccgaagggtgtcacccccaagtacagcttgaagcctcttgttccacgcttgtctgagctacttggagtcgatgttgtgatggccaatgattgcattggtgaggaagttgagaaattggctgctgctttgccggaaggtggtgttctactcctagagaatgttagattctacaaggaggaagaaaagaatgatcctgag

SEQ ID NO: 42699 - DNA, 476 bp, Oryza sativa
  Clone ID: uC-osroM202023a05b1
ctgagtcgtttcgtctcgtctcgtctcctccgtgggagattccgagattctactagctataggacttttcagtctggtaaattttttccatcagacagaaattatctggctacaacctgctgcttcttgatgctcaactaccagagaattaacatcactatctcagatggtctagcccgtcagagttgaagtacagtctggatcaaaattttcctgaaatccagacagtaagttcatggacagggcggacacatcgggttttgtcagtggtggactcatcggattacttagcctagatgaataacggttttccggaaatcattcgccgcggaaacccgcatctgatggataattccgcagttgtgataatgggacactctgtggcaagctacaccatggacagccatggacggagctcttcttgcctagaccacctgggttcatcaatggagaacagtagtatccatggcaagaga

SEQ ID NO: 42700 - DNA, 498 bp, Oryza sativa
  Clone ID: uC-osroM202023a09b1
cacggggtgtaaagtatgtagattgggtgggggttgacaatgcactggtccgcgttgctgatccgacgttcctaggttacttcatagacaaagctgtatcttctgctgcaaaggttgttaggaaggcttacccacaagagaatgttggagtatttgttcgacgaggacgtggtggacctctctctgtagttgagtatagtgaaatggacgcagctatggctactgaaattaatcagtcaacgggacgccttcgttattgttggagcaatatttgcttgcatatgttcactttggattttttgaatcaagtagcaaacagccttgagaaggacagtacttatcatcttgctgagaagaagatcccttccatccatgggtacgcaatgggcttgaagcttgaacagtatatattcgacgcgttcagttactccccatccacagcactttttgaggttttgcgggaggaggaatttgcgcctgtaaagatgcgaatggcgc

SEQ ID NO: 42701 - DNA, 428 bp, Oryza sativa
  Clone ID: uC-osroM202023a10b1
gctgatctactagctacctagtacggggatgttcttaactagctttggcttgatcaattgcagcaatggcggcgaaggcagcgctcgttctagcggtgagcctcctggtggtggccgtggcgagcgcctgcacctactgcccggagccgtctacgcctaagccgaagccgccggcgccgaggccgccgacgcccggtggcggcgccgggtcgtgcccgcgcgacgcgctgaagctgcacgtgtgcgccaacgtgctcggcctggtgaaggccaagatcggtacggtggcgccgtacgagccctgctgctcgctgctcgacggcctaaacgaccttgacgcctacgtctgcctctgcaccgccatcaaggtcaacgtgctcggtctcaaccttaacatcccgatagaccttagtctcatccttaacaac

SEQ ID NO: 42702 - DNA, 512 bp, Oryza sativa
  Clone ID: uC-osroM202023a11b1
cgcgccgctactcctttctcgccgagagagctctagggtttccgctgccgaatttttttttaattcggggggagagatttgaagaggcggcaccatgttggtctaccaggatctgcttaccggtgacgagctcctgtcggattcgttcccctacagagagatcgagaacggcatcctctgggaagtcgatggcaagtgggtcgttcaaggagctattgatgtggacattggtgccaacccatctgctgagggtggtggtgatgatgagggtgttgatgaccaagctgtgaaggtggtcgacattgtggacaccttccgtcttcaggagcaacctccttttgacaagaagcagtttgtgaccttcatgaagcgctacatcaagaacctctccgccaagctggatgcggaaaagcaagaggaattcaagaagaacattgagggtgccaccaagtacttgcttggaaagctcaaggaccttcagttctttgttggtgagagcatgcatgatgatg

SEQ ID NO: 42703 - DNA, 162 bp, Oryza sativa
  Clone ID: uC-osroM202023a12b1
gtactagatcgcgagcggccgccctacttggtgggtacttcatacctttcgggcgcgcacacccatcctgaacttattgtcaccatacttcatcaccggtgggactggaaacaccgtgtgcggacctgactttagggcgtgggaacacaggcaactaacgcc

SEQ ID NO: 42704 - DNA, 463 bp, Oryza sativa
  Clone ID: uC-osroM202023b02b1
gagccaactccggcgacggtaacgacggcgccgtcggagggcagagcaagctctcgccgtcgggcctgctgatacgcgagattccgggcggctacggcgtgcccttcctctcgccgctgcgcgaccgcctcgactactattacttccagggcgccgacgagttcttccgctcacgcgtcgcccgccacggcggcgccaccgtgctccgcgtcaacatgccgcccggccccttcctcgccggcgacccccgcgtcgtcgccctcctcgacgcgcgcagcttccgcgtcctcctcgacgactccatggtggacaaggccgacacgctcgacggcaccttcatgccgtcgctcgcgctcttcggcggccaccgcccgctcgccttcctcgacgccgccgaccctcgccacgccaagatcaagcgcgtcgtgatgtcgctcgccgcggcgaggatgcaccacgtcgc

SEQ ID NO: 42705 - DNA, 509 bp, Oryza sativa
  unsure (1)..(509): unsure at all n locations
  Clone ID: uC-osroM202023b03b1
cagcgcaccaccaccaccaccaccaccaccaccaggaccgtctccagccatggcctcctccgcctccctgcagcgcttcctccccccgtacccccacgcggcagcatcccgctgccgccctcccggcgtccgcgcccgccccgtgcagacgtcgacggtgtccgcaccgtcctcctcgactccggcggcggacgaggccgtgtcggcggagcggctggagccgcgggtggagcagcgggagggccggtactgggtgctcaaggagaagtaccggacggggctgaacccgcaggagaaggtgaagctggggaaggagcccatgtcattgttcatggagggcggcatcaaggagctcgccaagatgcccatggaggagatcgaggccgacaagctctccaaggaggacatcgacgtgcggctcaagtggctcggcctcttccaccgccgcaagcatcagtatgggcggntcatgatgcggctgaagctgccaaacggtgtgacgacgagcg

SEQ ID NO: 42706 - DNA, 149 bp, Oryza sativa
  Clone ID: uC-osroM202023b04b1
actagatcgcgagcgagccgccctatattattgggggggtttttaattttattgttggaaggataattttttgtttgttttgggcagaaccccaaacaaacgggcgcgaaccaaacggcgaggaagaaaggcacgggccgcggctcaca

SEQ ID NO: 42707 - DNA, 101 bp, Oryza sativa
  Clone ID: uC-osroM202023b05b1
ctcccgtctctcgtctcctccgccgccaagacgagtcgcggctgaacaggggaggggcgccgcaatctccatctggcgagcagagcaggggaggggagggg

SEQ ID NO: 42708 - DNA, 529 bp, Oryza sativa
  Clone ID: uC-osroM202023b07b1
tgatcgcttcaaacgacagtttgcacacctgggggagaactacagcaaaggagaaagaggttctccactgcagaggaagcatgcttctttaccgagggagagagtaggtgtatcaaaggatggttataaccaacaaaacaccaatgaccaagagaggagtgcagattccgttgcccgcactacagtaagccctccaatgtcacaagatgcacaacaacatggatctgctggccaaaatggtgtgacatccacagacttgagttcgaggagctatctgaagagtgcaagcattagtgcttccaagtgtgtcgctgtcaaggacaataaagaaccagaggatgattacatctctgaagaaatggaagggtcggtcgatggattgtctgaacaagtctccaggatgcactcctagtgcacaacgatgacgatgatcagtgcaagattctgtgaggcgcaccagatgctgataatttccaagcagaatgctgcactgcaagtttggactttggacaatgcaagtatgcaacag

SEQ ID NO: 42709 - DNA, 464 bp, Oryza sativa
  unsure (1)..(464): unsure at all n locations
  Clone ID: uC-osroM202023b08b1
ctctcttcccttcttggttttgcccaagaaacgaaaaccaaaaccaaacccaagaactctcctcaaaagaaccacctcacttcatagctctcacaaggctcacgcacacatagagcttgtgagagcttcttctttctctctctcttgtccttgtggtagctggtgcttaaaggaggaggaggtgaggaggaggcgcaatgtcggagcagccattgccgcagcctcggagcagcatgcgggaggcgctggagaaggaggacaaggagaaggcggcggcggccaaggagaaggccgccgtccccaagaacggcggcaacgggggaggaggcaagaacggcggcggtaacggcggcggcaacggtggcgccggcgcccagcccggggaggagacgacgagggagattcangtggtgagggaagcgtaccggagggagccggcggcgccggcgtacgtgatgcccgag

SEQ ID NO: 42710 - DNA, 465 bp, Oryza sativa
  Clone ID: uC-osroM202023b11b1
tctctgtctcgtcgtcctcgcatctccactcggggtgggcaagattaagatcggaatcaacggtttcggaaggatcgggaggctcgtggccagggtggccctccagagcgaggatgtcgagctcgtcgccgtcaacgaccccttcatcaccaccgactacatgacctacatgttcaagtacgataccgtgcacggccaatggaagcacagcgacatcaagatcaaggactccaagactctgctcttgggcgagaagccggtcaccgttttcggcatcaggaaccctgacgagattccgtgggctgaggctggtgctgagtatgtcgtggagtccaccggtgtcttcactgacaaggagaaggctgctgctcacttgaagggtggtgccaagaaggttgtcatcttagccccgagcaaagatgctccgatgtttgtctgcggtgtcaacgaggacaagtacacttc

SEQ ID NO: 42711 - DNA, 488 bp, Oryza sativa
  Clone ID: uC-osroM202023c03b1
ctcttcttcccccccttctcctctctcctctttttttcctcatccgtgcgcgatactgcgcttagtttgtgggtggggggagtgatcatcaccaaagccacaaagggggcgcggagagatattatatattctttgggaaagcgttggattagtttttctcgctttgggctttttatccggagttggagtgtgtgtgcgccgggagtggtggtggtgatggcggccggagaggaggtgatggatcggtcgacgtcggccgaggacgggtactgcagcgccggcacggactcgccgcgggcggagtccgtcgacgagcaaggggccgccgaggagtcgtcgccccggggagggcagaagcgggagctcccctcgccgtcggcttcgccgtcgtccccgctgccacctgccgcgaagcgcagccggaggtcagtggagaagcgggtggtgtccgtgccgatcgcggagtgcggcgaccggccgagggcgcc

SEQ ID NO: 42712 - DNA, 522 bp, Oryza sativa
  unsure (1)..(522): unsure at all n locations
  Clone ID: uC-osroM202023c05b1
atttccactcctccccccacccaactcaccatcggcattccttccctccttccaccgctccctctctcttccatggccgtgcaggcgcagtacctctcccacgcctccttcccccacgacctctatggcctcagggctctggagggtgcgacggcggcgggttctttgttcttggacgaccacggcgggtgcgcgccggcgactccggcggcggccgcggctgggatagggcacacggtgctgagcgaccttccccggagcgagcttacctgcaacgacaataacggcgcgggatacggattcgtgccgaggaagagggcgcgcctggatgcggatgagtcggccggggcgttgatggcggcggcggcggcgcagcagcagcgcatggttcttccgccccatggccttgtctttcccggggatgtgcagagcanggcggtgggttgcggcgccgcgtccaccatgcggagggctggcaatgccgccggcctctcgcaggggctcctgtctcagctctatcat

SEQ ID NO: 42713 - DNA, 493 bp, Oryza sativa
  Clone ID: uC-osroM202023c06b1
attggattggattgttttgctggctcgctctctctctctctctcgtggtgtggtgtggacaagaaaggaaggaaagatggagggcggcgtagggggggaggtggaccacctcgccggcgagagggccaccgcgcagttcgacgttgaacacatgaaggttgcctgggctggctcccgccacgccgtcgatgtcgccgaccgcatggcgcgcctcgtcgcttccgaccccgtgttccgcaaggataacaggactatgctccccaggaaggagctgttcaaggacacactcagaaaggcagcccatgcgtggaagcgtatcgtcgagctccgtcttacagaagaggaggcaaatttgctaaggctatacgtggaccagcctggttatgttgatctgcactggggcatgtttgttcctgctataaaaggccaagggactgaagagcagcagaagaagtggctacctctggcctacaggtttccaataattggatgc

SEQ ID NO: 42714 - DNA, 443 bp, Oryza sativa
  Clone ID: uC-osroM202023c07b1
ttcttctcaggagatctttggccacacactggggtctctccgtggaattaagtatctctacaagtacaatgttttccagtatggctttgtggctcttgcgatactcacactcttttactatgcaatatttggatggcgaaagaggaaaccgacaggaagattccagctctcaaattgatttgtggtttgttctgtaaggaagcctgacgaattgaactacaaacatatttgttcacgagtgatagattggttagcaatgtatatgatctttgaaaccgctttctcaaagagctggagagtttatccatgtaaattagcaaccatgaagtataaggagaaaactgagatttcagtagggcacggacatggttgttaaaagcagaacccagctgcctttgtaatgtacacatttctcatcgcggctcttcttttccttgtgtatt

SEQ ID NO: 42715 - DNA, 419 bp, Oryza sativa
  Clone ID: uC-osroM202023c09b1
ttctcaatctccttggtcgcggaaccgaaggggcagtctaggcacagggtgtgggcggaggacctgctcctgccgcgggaggcggaaggggaggaccacttcgaccgcgtaccggactcgctcgtgctccttatctataaccgtctcgccgacgcgcgctcgctggggcggtgctcggccgtgtgcaagcggttcaactcgctcgtgccgctcgtggacgacgcctgcctccgcatcgaccgcgtcatcaccgacgcggccgacgccaactacacgctcggcctcaccgtgccgcgccccgtcggccgcggggtgctggcgcacctcctcaaggcgatgctgctcgccgtgctcaagccggtcgggcactgcgacgccggggtcaggagcggctgcggtagagagcgctcggggaagca

SEQ ID NO: 42716 - DNA, 469 bp, Oryza sativa
  Clone ID: uC-osroM202023c10b1
ctgtaagggaaaaggggattgggacgaaacttggggagaaacgtattccaagaaaaggatacctgcattgttcgtggtcaacatttcaagcggtgaagtgcgagctgtgaagggcataccgtgaacattaagtgttggccaagtgatttgggctccatcatcatcacatagcctgttttttgtggcgtggtcatctgataatggttaccaaaagacaccaaggaaacttggaattaaatactgctttaacagaccttgtgctctgtatgctgctcctgatcctttcatggaagaagctgataagccatcacttaatgtcagtaagggtgaaactgcacctacaaccaagttaacatcagagttgagcagtgcttttttcccacgattcagtccagatggaaagtatcttgtgtttatctcagcaagagtgctatagatagtggaacacacaatgcgacaattcaatgca

SEQ ID NO: 42717 - DNA, 442 bp, Oryza sativa
  Clone ID: uC-osroM202023c12b1
gctagttaccagccatggagtcgctgactctccggggatagccgtcaacggccgcgccgttgcgccgcgtccccgggcggcggcacgcggcggtgtccgtccgcacctccgtcggcgccgtcgagccgtacctctccgtgcgcagtgaacgggctgaagatgcccaacccgttcttgatcgggtcggggcccccgggcaccaactacaccgtcatgaagcgcgcgttcgacgaggggtggagcggcgtcatagccaaaaccgtaaccttggatgctgagaaagtcatcaacgtaacccctcgctatgcccggctcagggcggaccccaatggatctactaagagtcctatcatgggatggcagaacattgaacttatgagtgatcggactctagaaactatgctgagtgaattcaagcaactgaagaaagagtatcctgaca

SEQ ID NO: 42718 - DNA, 403 bp, Oryza sativa
  Clone ID: uC-osroM202023d01b1
ttttcatctagccacaagcaacacaagtccaagacaagtcaagcgttcgcaccaagtcaaaccgcgcctcactgccaccttcgtttgcgcaccatggagcttgccctggttggcaacccttcgaatggcgtggcgaagccgtcgtgcaactccgtcggctcgctgcccgtcgtcagctccaacgccgtcatcaacccgccggtgaccagcgcggcgggcgccacgctcggcaggcacctcgcgaggcgcctcgtgcagatcggcgccaccgacgtgttcgccgtccccggggacttcaacctcaccctgctcgactacctcatcgccgagcccgggctcaagctcatcggctgctgcaatgagctcaacgccgggtacgcggccgacggctacgcccgcgccc

SEQ ID NO: 42719 - DNA, 538 bp, Oryza sativa
  Clone ID: uC-osroM202023d02b1
cacactctccagatccacagccatcctcccaccgccggcgccaccatctccaagcccacgaacacccacagccaccgtgagctcgagcgaggtaagaaaagctttagatctgagcgacttcgagcgtcttcaaggtaaagttttctcgaaaccctcttcttcttcttcctcctctggctcccccacctgttcttctacggtttcttggttaggttgcttgcagagagcgagagacccagggccttttagatccagggctcccagatctgctgtttttctttcatcttctttgtgttctagtgttaggttggtagccaagaggggttctttttccacacctcacttgctagatctaccaccaaaaagccatctgtttttttactgtggctgtcgatttctccctccttcctgcctgttcttgattttggattcggaaccaggcaaatctttgttactactgttttagtatcagataaaaaatcccaaaccaaagagtgagtagatggctgcagctatagatctgtcaggggaggagctg

SEQ ID NO: 42720 - DNA, 531 bp, Oryza sativa
  Clone ID: uC-osroM202023d05b1
gtgattggcccatgcagcagtctgatgataccaatttacgtctccacagagacaaacagtgggcggtgcaggacaaacggcaggtgcttcagaggactctcactgaaatgcacacttttatcaaacatgctgaatggtggttccacaaggacgtctttgcccaggtcctgcaggatgctaaagatgcagtaaactgtgcagaggacctgttggatgagatcaattaccatgaactccagaataaagtcgagggtcatgcaattctatttcatgtccaagattatcatgaaacaaaaattgataaaatccaaggaaagctcgaacatctcgtaagacaaatggaacagctgggcttgtatgatgaacggcagcagtttattattgagtcaatcaaccgagaagacgatcttttcggagaggagcaaacaatctttgggcgtcagaaagagatgtcggaattgattgagttgattggtttgcaagagaacagtccaactgataagcaagtcactgaggtacatgcagtatctg

SEQ ID NO: 42721 - DNA, 529 bp, Oryza sativa
  Clone ID: uC-osroM202023d06b1
tcggctgcgacggcgttttcgtcggctccggcatcttcaagagcggcgaccccgcgcgccgcgcccgcgccatcgtgcaggccgtcacccactacagcgaccccaagatcttggcggaggtcagcagcgggctcggcgaggccatggttggcatcaacctctccgatcctaaggtggagcgcttcgccgcccgctccgagtagcccatccatcatcattcatatccgccttatccttctttcgctatatatatatgctccttccttcgattaagtaataattacatctactatcatcgtcgtgataagaagaaaatgaattagacaccagccagccaggactttgttggcttggctcacttcccttcccttcccttcttggtgatgatgtaacatggaacagcacatgtatcgattaggagcatgtattgctatttttgctaattgctgtggactggatccatttctatggaaactgtcatacttcccgttctgttggtacccatggccacttttacctactcgtactt

SEQ ID NO: 42722 - DNA, 527 bp, Oryza sativa
  Clone ID: uC-osroM202023d07b1
tagcctggcacggtgttttcgtgggctccggcatcttcaagagcggcgaccccgcgcgccgtgcccgggccatcgtgcatgccgtcacccactacagtgaccccaagatcttggcggaggtcagcagcggtctcggcgaggccatggttgtcatcaacctctccgatcctaaggtggagcgcttcgccgcccgctccgagtagcccatccatgatcattcatatccgccttatccttctttcgctatatatatatgctccttccttcgattaagtaataattacatttactatcatcgtcgagataagaagaaaatgaattagacaccagccagccaggactttggtggctaggctcacttaccttcccttcccttcttggtgatgatgtaacatggaacagcacatgtatcgaataggcgcatgtattgctatttatgctaattgctgtggactggatgcatttctatggaaactgtcatacttaccgatcttgtggtacccatggccacttttacctactcgtac

SEQ ID NO: 42723 - DNA, 479 bp, Oryza sativa
  Clone ID: uC-osroM202023d08b1
gatgtggtggtggtggtgtgtggcctccttggcgtccctcctctcgcgagggtgccatgcctcccccaagatcctagaacgcatgcccacaacctcacctcgctcgcaagaatcttatttccaccatcgccctccctcgggatcgatccaacccgatcatcaatcgcggcggggaaggaggaggaggggatggaggcggacgccgggaagctgttcatcggcggcatctcgtgggacaccaactaggaccgtctacgcgagtacttcgacaagtacggcgaggtggtggaggccgtcatcatgcgcgaccgcgccaccggccgcgcccggggagtctggttcatcgtctttcctgaccctgccgtggccgagcgggtcattatggagaaacacatgatcgatggccgcatggtggaggcgaagaaagctgttcccagggacgatcagcacgctcttagcacgagcggacgtaagcgctc

SEQ ID NO: 42724 - DNA, 457 bp, Oryza sativa
  Clone ID: uC-osroM202023d09b1
gcatgctcaatgggctggagatcatgaagctggggcgcgccgataatttgaactccgccggatcgcacggcaggaggaagaagattctcatcggcacgctctcggcggcgctcggcgtcgctgttcttgcgtgcgcgctgctctgcttgctcgccgtgctgcgcaggcgtagacaggcgccgactccggcgccggaggagaaggagagcacgcagctgccgtggtcgcagcacacgcaggatggctccagctgggttgacatgtcgaacgcgtcgggcgcgggcatgaccggcgggctgcacaggatgagcatgcagctcaacatctcgctggcggacatcacggcggccacggagaacttcaacgagcgcaacctcatcggcgtcggcgggttcgggaacgtgtatagcggcgtgctccgcgacggcacccgcgtggcggtgaagcgcgccatgcg

SEQ ID NO: 42725 - DNA, 416 bp, Oryza sativa
  Clone ID: uC-osroM202023d12b1
ccgcgacacgcgcgctagttcaactgcctcgcttcctccctcctcccgagcgaccgcgccatggctgccgccgccgtcaccaagtcgccgccggcgctggtgcccccggcggggcccaccccgggcggctccctcccgctctcctccatcgacaagaccgccgccgtccgcgtctccgtcgacttcatccaggtcttcccctcctccgccgaagccgccaaggaccaggccgcatcggtcgccgccatgcgggagggtttcgccagggcgctcgtccactactaccccgtcgccgggcgcatcgcggagccggtccccggggagcccgagatcgactgcaccggggaaggggtgtggttcatcgaggccgaggcgagctgctcgctcgaggaggcgcgcaaccttgagcgccccct

SEQ ID NO: 42726 - DNA, 507 bp, Oryza sativa
  Clone ID: uC-osroM202023e03b1
ccatttcttcctttgggatcaaccatgatttcactgggatgtgctacccgctgctggtcagctccatgggcatcattgtctgcttgatcaccactctctttgccactgacttcttcgagatcaaggccgtgaaagaaatcgaaccgtcactaaagaagcagctcatcatttctacggctctgatgactgttggtattgcactggtcagttggttggcgctcccatacaaattcaccatcttcaattttggtgaacagaaggaagtcactaactgggggttgttcttgtgtgtttcgatcggtctatgggctggtctgatcatcggatacgtgacagagtactacactagcaatgcatacagccctgttcaggatgtcgcagatgcttgcagaactggtgctgccaccaatgtcatatttgggcttgctctaggatacaagtctgttattatcccaattttcgctatcgcgcttggtatctacgtcagcttcaccattgctgcgatgt

SEQ ID NO: 42727 - DNA, 432 bp, Oryza sativa
  Clone ID: uC-osroM202023e04b1
tttgcccggacggtcattctcagattcttgcatattactcacttgcaggaatgagatcagattaccctcactcagtaattcccctctatccttcggtttgagtgtatatgtctgataccaggttgcgaaactcacactctagtataggccgatattgttccaaattctacagtttgctgctcttattctgtttagcaatgagcacagaacaaatgacaaataaaagcaggatagctgttagttcgaggaacatattataacatcttgggactaagaattttattgcatatctgaggggtatcacttctgcgaaagctcagctcaattggccagcacggatatgtaaacttctccattttgattaggatcggacacacaattttgtaataatgttccttgttcaatgtttagtagtattatttgactctttaa

SEQ ID NO: 42728 - DNA, 540 bp, Oryza sativa
  Clone ID: uC-osroM202023e06b1
ctttctaccccccacacgcgattcctcccctccaagtctccaactaacagagaggggtggtggtggactcattcgcgcgaccaagtatccgctagtacgcgccgcggagtggaggagacggagagagcccgcgcgcgcgcgcgcgatggtggcccgccggttcgtcgtgcggcaggggggcggcggcggcggaggcggcgaggcggaggagcacgaggtggagtacgacacggagcacggcctcgacatcctccgcctccagatcttctccctcacctccgtcccgcccgagctccagaagatcgtggtggaggcggacgggtccgtggtggacgacgggaccgacctggaggccatctccgagggcctccgcctcgtggccatcaccggggaggaggaggaggctgaggctgcggctgcggcggaggcggcaagggcgcaagagaagtcggatgaggagctcgcgcggatgattcaggcggaagatgaggcacttcttctacaacagtacagcatacgcaatgatggaggggaggaatt

SEQ ID NO: 42729 - DNA, 493 bp, Oryza sativa
  Clone ID: uC-osroM202023e08b1
tcgctcgtcgccgctggaatgatcggcggcgtgggccgcagcaggcggcgtggccgtgcgccgccagttctgccctcgagcgccgccgcccgccgcgccgagcactccgtctcttgctggtactgtgactgcaaaatatattccttcaatgacatcatatttaatttgggatggagatatgctagatacatgagagcatggttttctgcaggggtttatttctctgttgttgctttagttggaatatcagtgatgctattgtgggactcaattggtgcagtttatttcagtggtcggtcatttagtacctggctacaaaatctactggcttccagctttggcatatcaataatggacatcgcagcaatcatagcatcaacagttttttctattgcttttcacgaatttggacatgctgttgcagctgcaagcgagggcatacagattgagtatgttgcggtattcgtagctgcactttttcctggggcattaa

SEQ ID NO: 42730 - DNA, 298 bp, Oryza sativa
  Clone ID: uC-osroM202023e12b1
tttatttttccccacccccgcaccgtttcctatgtcggtttttaaagctagcgggggagatgccctccacaagctcaccttactcccctgccatggatcaactgcacggtgagagcttccagaccacggtggtcattgacgttttattctactaaggtctgtctcggacgtctcctccctcctcctccgtttcagaaatcccaaaggctgtttggatcctgacaacttcaagaagtatataacatgttgaaaaataagcaaataatgtcatatcgtgggctgattaaaattttgcttt

SEQ ID NO: 42731 - DNA, 337 bp, Oryza sativa
  Clone ID: uC-osroM202023f01b1
atactttcgtgcttcattctgagctggagaggagaggcaaagtaaaacctgttcatgttgttgacgttcctggtcatgcaaggctcaaacccaaacttgatgaagtcctgcctcaagcagctggaatagtttatgttgttgatgctcaagatttcttgtctaccatgcatgctgctgcagagtacttgtatgacatcctgacaaaggcaactgtagtgaagaagagggttcctgttctgatattctgcaacaagacagataaagttacagctcactcaaaagaattcatcaagaagcaattggaaaaggaattaaacaagctccgggaattaaagga

SEQ ID NO: 42732 - DNA, 486 bp, Oryza sativa
  Clone ID: uC-osroM202023f03b1
cttccttacgggctcacgcgcggcggggagagagaggacgtcaccgatcggccatgtccgcagccaccgcgtgcgcctcgccggcggcggcgcgcccgcccctccacatccccctccgctcgcctccttccgccgcgcaccttccctgcgccgccgcctcccgccgggcctcctccgccgcttgccgctgcaccgcctccgcctccgcctccgcctcgccctccacctgggattggacccgctggacccgccacttcgccgacgtcgaccaggccgagagctacgcctccctcctcaagttccagctcgaggaggccgtcgacaacgaggacttcgcggaagcctccaagctcaagaaggccatactcgaggccacgggcaacgacgccgtcgcccaagtcatgtctgaactcaagactgctatagaggaacagaggtatcaggacgcctcaaggttgacaaagcttgccagaaccaacttggtag

SEQ ID NO: 42733 - DNA, 456 bp, Oryza sativa
  Clone ID: uC-osroM202023f04b1
gttgttctctttttccactacgcactagtagtaggactctggtattctcccatggcgactgcgaccgcggaggttgccgctgcggctgctgccgccggcgaggcgccgccgccgccgccgccagcggtggtagaggaggcgaaggaggctctggaggcaccgaagccggaggaggcgccgaaggctgaggagggggaggagaagaaggcggagggtgagaaggagaaggagaaggcgaagaaggagaggaaaccgagggcgaggaagccccgatcggcggggccacaccacccgccctacttcgaggtgaggggaaaatcaattgatcgatcgatgcagtgatcatgtattgggctgattcgagtttgtgagaattttgtgtggttttgagccagatgatcaaggaggcgatcatggcgctggacgggaacggcaaggcgggatcgagcccgtacg

SEQ ID NO: 42734 - DNA, 534 bp, Oryza sativa
  unsure (1)..(534): unsure at all n locations
  Clone ID: uC-osroM202023f05b1
ctccccaccccgaccagcggcgccagagcagaggcagtgaggccgagctcctcgcctcgcctcgccgtctccgcccgcgcggcgctgccgccgagccgccgccggcctcctcctcctcctccttcccggttcggatcgggcccaagagccggactgcagccatggcagatctgcaggagcccctcgttcgtccgaagaggaagaaggttttggtggactacttggtaaagttccgatggattctggtgatctttgtggtgctccccatttccgctctgatctacttcaatatctatttgggcgatgtctggtctgccatgaaatctgagaaacgtcgccagaaggaacatgatgacaatgtgcaaaaagttgtgaagcggctcaagcagaggaacccaaagaaggatggccttgtttgcacagctaggaagccctggattgctgttggcatgcgcaatgtagactacaagcgtgctagggcatttgagggtgacctttccgccttcaggaacattctngagattgacagagaga

SEQ ID NO: 42735 - DNA, 480 bp, Oryza sativa
  Clone ID: uC-osroM202023f06b1
tctcactcacggcgaacttccagcctctcccgccgcggcttccgcgccgtccgctcggcagtggcgccgccgcctcgccgcgcaatggcccccgccgtgctcctccgcctcgccccctcgccgccgtatccccagaacccgccgccccggcggcggagccccgcctcggcatgcggcgcctcgcgccgcgacttcgccatccacaccgccatcgcctccgcctccgccgcggccgcggtctccgttcgtccggccaccgccgccgccgccgacgaggaggcgccaccgggggagccttcccaaaataagaagggctcccctctgctgggcggcatcgcgaacaccaagtcgtggtcgcagtactacggcagcggctttttcatccgcgttcccccttccttcgacgacatcttggagcccgaggaggtcaacgtcgggatgacctactacggcgacaaggcgaagcccaggacatacgct

SEQ ID NO: 42736 - DNA, 474 bp, Oryza sativa
  Clone ID: uC-osroM202023f11b1
tcactcactaccctgcacctcgatcaattgaacgcgagcaaggaaagagagagagcgagaaagagagcggcaatggcgacgtcgcacgcggacgtggagaagggggcgaggaggaaggaggtggggaaggtgccgtcgccgctgtacccgcagcacgagggggagagggagtgggtgccgtggatcgtcccgtcgttcctcgtcgccaacatcgtcgtcttcgtcctcaccatgtacgccaacaactgccccctccacaccccgcctcgcagcggcaagtgcatcgcccgcttcctcggccgcttctccttccagcctctccacgagaacccgctcctcggcccctcctccgccacgctacagaagatgggagcacttgtgtgggacaaggtcgtgcacgagcaccagggctatcgcctcatcacctccatctggctgcatgccggtgttctgcacctggtcgccaacatgctc

SEQ ID NO: 42737 - DNA, 504 bp, Oryza sativa
  Clone ID: uC-osroM202023f12b1
attgtagaccaccgcagggcaggaggactgagcaggagtggactgggcttccatgggacttctgctctccatgcatccccaacagcagcagcagcaaaagccaggcctgctgagctccaccttgctcaaactagaacagacagcgaggtctgcagctccaggcctagctcaccatgtagataaattgctggggtcagtgggtgtctcctcctcccacccacccacagccccctaccagcagccccaagtgctacccccatacccagcaggccagtaccagcagtgctggccctacgcgcagcccgggtcagcttacccacagcagcactggcagggaccccctccggcctaccagccccagtacccacaacaaacaccagcgccagtcacgcagctatacccccctgcaccagtcactcaggtgtaccctgcccctggaggctaccagacaggtggtccgcagtacccacagcaccagcagcccctgcagcagcagcagcagta

SEQ ID NO: 42738 - DNA, 511 bp, Oryza sativa
  unsure (1)..(511): unsure at all n locations
  Clone ID: uC-osroM202023g02b1
atcagttttcaaacctgctgaaaataacggagctgtagctccaccacctcgtatgagtgaggccttgggcatctcatcgcagcaacttccagaccaaaaaagagttgtgccaacaaacattcctcctccagcacctgcccctagtatttctgctgtaccacctcctccaccggtattcaacctgcctcctcccccacctccacctcctcttacctaatccttcatataaatcagaagcaatgccgaatagccgaagataaatctaagcgcttcttttacagaacggcctgtctattagtcctagcaacttaatgaagctccaaaatctcatataaagcgaggtctttctttccaagaagaactggcacttcgcttggcaaaaggcaaggattacaaacagtttcaaactattcacgaagaagaacatgaatagccatctcggatctaatagcctgagaagccaagaccatcagagcctangatgataccaataatccagcctcaaccacca

SEQ ID NO: 42739 - DNA, 549 bp, Oryza sativa
  Clone ID: uC-osroM202023g04b1
ctcttgcaagccctagccgccacatctcctgcgtgctaccaccgccgccgctgttcctgtctccgccggcgccgccgccgccgccggttcagccgtcgtcgtccttcgccaccccatccgctcgtctccttgcgtggcttgctgcttgacgctgctgcatcgatcagagacgagaaggctccagacagcacaggaagcagttgaacaggagtaacaagggaaggaaaaggtatgaagggttccaacgttgaaggagttgagtcggagtatcgaaggagttaaagcaagtacaagacggacttgtgcgatggataaactgtgttgctttgttggttttatttacccaattattattcgaagcttcctattatcaattgtgtggttttggtattatgttacatattcatatttcacttcatgttcaagttcacgacgttattcatgtttctttcttccggaagtttctgtttacgttattcaagtaccatgcgtagttatgggagtgcaatttggatctttattcatgatccttaagaagcgctgatcacg

SEQ ID NO: 42740 - DNA, 550 bp, Oryza sativa
  Clone ID: uC-osroM202023g05b1
cttccatcgatccctccttctccttcctccgcctgcgcgggcacgacgcaaggccgcctcgcgccgcccctggtcgaggatcgatctccccttcccctcctcggctcccgtctccttcgcccgcttgccggcagcgccggtctccgtcccgcgagctgcggtggtgccgccgtctctgtccctgctgctgctgctgcttccgccgccgatctggaagcttgtagcagtttatgtgttccccagaaagtttgggggttcaactgaccccttgcctgaagggagggagtattcgattcttgaagaagagagagagagagagagtatttgattcttgaattctactagtttggaaggaggggagctgcgttattattattattattattattattattattattattattattattattattattattattattattattattattattattattatttttggctcgtttggttcatggagtcgaaggaagtgcatggccgggatgtgctggttgatctggagacagggaattgcttgctaatgagagagggg

SEQ ID NO: 42741 - DNA, 428 bp, Oryza sativa
  Clone ID: uC-osroM202023g07b1
atcgatcggagaaaatggtttccgccgccgccgcctcacgcgccggggtgtgaaggcctcacgccgccgccgccgcggcgcgcgcgagccccgccgcgggggcgcgggtgacgctcccgcggcgccgaagcgtccgatccgcggtgatctcgtcgtcggcgtccgcggcggcggtggcggcgtcggagccggcggcggggagggtgacgctgggcgcggggacggacggggcgctgtggccgaagccggcggtgctggtggcggagaagctgagcgaggccgggctggcggtgctgcgcgggttcgcggacgtggagtgcgcgtacgggatgtcccccgcggagctcctcgccaaggtggcgcagttcgacgcgctcatcgtgcgcagcggcaccaaggtgacgagggaggtgctggaggccgggcgc

SEQ ID NO: 42742 - DNA, 478 bp, Oryza sativa
  Clone ID: uC-osroM202023g08b1
ctttattatttgctttctagagtagaaattgtttgaactaggtgtacaatttctagagagtagttgatctatttgctttctagagtggagaaattgtttgaactaggtgtacaacttttagagtgagtacttgatttatttgttttgatgttttctagagtagagaaattgtttgaactatgtagacatgtgaaacattgaaagcctatttggaagatctggcccaattttttgtttgtttggatggcataactgtgatttgttctgcaaccctgccatgcgtatgcgattttgggggaaagtacattgagaaatctctttctggatcactatgattttttgtctccaaaatgttttgatggagcttttgattgtctctaatgttctagtgttgacatcagaggtttgttttgttttgtttaaaaaaaatcggtaatgatgagttcagcttacccaccttgtacagagttagtagtct

SEQ ID NO: 42743 - DNA, 514 bp, Oryza sativa
  Clone ID: uC-osroM202023g09b1
tggttcgtcgagagccggtcgttcccgctctaccgcttcgtccgcgaggagctcggctgcgtattcctcaccggcgagaagctcaagtcccccggcgaggagtgcaacaaggtgttcctcggcatcagccagggcaagctcatcgaccccatgctcgactgcctcaaggagtggaacggcgagccccttcccatcaactaagccaagatcccatcgccattgccattgccatacacccatcatcgaggaggagaggagactaaaaataaaagaaaacgaaccgcttcgtgtatcttcagacaaaaaagaccctgtattttcttcgttcgttgccgtttggtttatagtgatctcgtgttctttgtgttagctgctctgctcagcttgccagccatggcggcaaagcaagcggcttttctaagatattgtcgctaaactgtattttggggtgaaagtattgctactcgattccatccttaaaaaagtgtggtaatagaaatggtttgatcctatt

SEQ ID NO: 42744 - DNA, 525 bp, Oryza sativa
  Clone ID: uC-osroM202023g10b1
tttttcgttggaggagctgctcttggcctgcgccgtgagcaggcacggcacggggagctgggactccgtcgccatggaggtgcagacgcggagccccctcgccgcgcgcccgggcctcacgcccaccagctgccgcctccggttccgccacctccaccgccgcttctccgtcggcggggcggcggaggaggacgacgacgacgaggaggcggaggagggtggccccgacgcctccgccgcggacgggtggatggacgagctccgccgcctccgcgtcgccgagctccgccgcgaggtcgagcgatgcgatctctccatcggaacgctacagacgaaagtgaagcggctgagagaggagagagaacaaagcatccacggcggcggcggcggcgaggggaagccggagacggcgaacggcgacgagcggctgtcgagcgaggagcccggccggtcgtgcagggagtccaattccacagatctgaaacccgcggcgcgcgccggtgaccatagcgtcaaggcggagga

SEQ ID NO: 42745 - DNA, 552 bp, Oryza sativa
  Clone ID: uC-osroM202023g11b1
tttatcctcagcctatctgggtggagggccctttgttggagccaccagctccaggaaaaaaagcagaaaaggcacaacctgtactggctcttagctgagactggtcggggtgccaccaaaaaaataggataggatagacttcgttcagcgtacagctaccgagtcaagagcagatcgcacctttgctgctggagcttgaagatggctgctactgaagctgcggccacccccgccactgcccctccccagaattcatccctgtatgtgggtgatctggatcgtgaggcaactgaagcgtccctgtatgagttgttctcccaggtcggccctgtggcatccatccgtgtgtgccgtgatgctgtgacccgtcgttcactgggctatgcctatgtgaactacaacagtgccttggactcagccgctgctgagcgtgccctggaggccctgaactacactgaggtgaatggcaagcccattcgcatcatgtggagccaccgtgaccctcaattcaggaagtcaggcgtgggcaacatcttcatcaagaaacctgac

SEQ ID NO: 42746 - DNA, 405 bp, Oryza sativa
  Clone ID: uC-osroM202023g12b1
tttaccccgtatcgccggcggcgatgcgcagacgccaatgacgacgactacgacgacgacgaaccacagcgccaagagcatactgctgctcgcgctcctgctagtgccgcacctcgccgcggcgttgacgggagatgcgctgatcaggcagcgccgtcgactgctcgactaccacggcggtagatggctgcatggagggggtgacttgtacttggacccagcgataacgttctacaacgcgcggctagtgctacgcgtaataccgcagaagcggcgcgtggaagcagcgccggccttacggacccgcacagacgagctgacacacaggatcgctgccaacgagcgcgcctacgctggcatgctctgtgcggacaagagacaccaccgccagctacgcagctatac

SEQ ID NO: 42747 - DNA, 449 bp, Oryza sativa
  Clone ID: uC-osroM202023h02b1
atcagttttcaaacctgctgaaaataacggagctgtagctccaccacctcgtatgagtgaggccttgggcatctcatcgcagcaacttccagaccaaaaaagagttgcgccaacacacattcctcctccagcacctgcccctagcatttctgctgaaccacctcctccaccggtattcaacctgcctgctggaccacctccacctcctcttacctaatccttgatataaaccacacgcaatgccgaatagccgaagataaatctaagcgcttcttttacagaacggcctgtctattagtcctagcaacttaatgaagcttcaaaatctcatataaagcgaggtctttctttccaagaagaactggcacttggcttggcaaaaggcaaggattacaaacagtttcaaactattcacgaagaagaacatgaatagccatctcggatctaat

SEQ ID NO: 42748 - DNA, 445 bp, Oryza sativa
  Clone ID: uC-osroM202023h03b1
atctgttttcaaacctgctgaaaataacggagctgtagctccaccacctcgtatgagtgaggccttgggcatctcatcgcagcaacttccagaccaaaaaagagttgtgccaacaaacattcctcctccagcacctgcccctagtatttctgctgtaccacctcctccaccggtattcaacctgcctcctcccccacctccacctcctcttacctaatccttcatataaatcagaagcaatgccgaatagccgaagataaatctaagcgcttcttttacagaacggcctgtctattagtcctagcaacttaatgaagcttcaaaatctcatataaagcgaggtctttctttccacgaagaactggcacttcgcttggcaaaaggcaaggattacaaacagtttccaactattcacgaagaagaacatgaatagccatctcggatc

SEQ ID NO: 42749 - DNA, 437 bp, Oryza sativa
  Clone ID: uC-osroM202023h04b1
atctttcttgaaatatgctgaacataacgggcgtgtagccacaccagccagtatgagtgaggccttgggcatctcatcggaggaactttcagaccaaaaaagagttgtgccaacaaacatttctcctccaggagctgcccgtagtatgactgttgtaccaccttctccaacgagattgaacctgactgctcacgcagctgcagatcctgtaacctaatggttcatataaagtataaacggtgccgactatccagagaataaatctaagcgctcctttgacagaacggcctgcctattaggactagcgacttagtgaagctgcaaagtctcatatgatgcgaggactctcttttcaagaagaactggcactttgcttggcaaagggctaggattacagacagtatcaaactattcacgaataagaacatgaatagcca

SEQ ID NO: 42750 - DNA, 514 bp, Oryza sativa
  Clone ID: uC-osroM202023h05b1
ggctaggggagagaggagagcgcgcagcgggagcagcagaagccgccagccagccatggcggtgggcgcgaccgccacgaagctgcacatgccgtccgcgggcggccgccgcccgtccctgttccacctcgcggccgtcgcggtgctctgcacggtgtcctacctcatcggcatctggcaccacggcggcttctccgcctccccggccggcggcgtcgcctcctccgtctccatcgccaccaccgcctccgtctcctgcgtctcccccaccccgacgctccttggcggcggcggcggcggcggcgactcctcgtcgtccgcgccgctcgacttcgcggcgcaccataccgcggaggggatggaggtggcgtcgggccaggtgcaccgcacgtacgaggcgtgcccggccaagtactccgagtacacgccgtgcgaggacgtcgagcgctcgctgcggttcccgcgggaccggctcgtgtaccgggagcggcactgcccgtcggagggcgagcgg

SEQ ID NO: 42751 - DNA, 541 bp, Oryza sativa
  unsure (1)..(541): unsure at all n locations
  Clone ID: uC-osroM202023h06b1
ggatgagcgtttctcttgccagcccagatggccgtgttgtcggtggtggagttgctggccttctggtggcagcaagtcctgttcagattgttgtcggaagcttcctaccaagctatcaaatagaacagaagaataagaagcctagggtggaagcggcacccgcccttgcacagactcctcctgctgttccaatctctagtaccgatacgcacagcagcgagcaagggcagcacagctccgtcgccccaagaacaacaaacatcgtaacctcagcatacaacccagaccagagctgggcatctcctgctcagtcgatacctgacagcgcgagaacaccatcgggcgatgtgaaggtcaccgcctctggagcctgaaactgagatgaactgaccaggatccatgaaattcctggtctgtcactgctgcagccgcacaccatgatcgccggtggcggccaaagatggcttcatttctttctgacttngtaaagatgtatctgagttccagtaggttttccatctttaggcagaagagtctaact

SEQ ID NO: 42752 - DNA, 476 bp, Oryza sativa
  Clone ID: uC-osroM202023h07b1
gcgatctgtttttatacttggtgacacatatagtgtaggttgtacttccagcttcgtcgattaccagacggcaccggcgtcgcgcgagcgagcttgatcttgcgccttgtgcctgctagctgcttcggcggcggcggttatcttcttccgatctgtaacagccccgatcaagaaaggatccaacccacctaggaggactaacctgaacgtgctaatgagttcaaagctagtaacatcacctctgaaatccatggagcagggccatctagagcaacctctgcgcgatccgcaggcgccggcggagcagcatgacatggggttatctcccctgacgctcctcggcttcgccttcctgaccttcaactcgggaatggcagtgtacagatcagatagagacttggcaaccatcttcttcgtggtcttctcctacgttgacctcgtatcgctcttctacttcctccgattatttgagaaga

SEQ ID NO: 42753 - DNA, 446 bp, Oryza sativa
  Clone ID: uC-osroM202023h08b1
tcgctcgcatgataggctcgtagccctcgccgtcggcgtcttcctcctcctcctcctcgcgccgcggagaggattccatcctcctccctctccccgccgccgccgtcaatcccgaatcccgagggctcgggtggtcgtcgtcggtccgggatggcgggaggaagcggaaggcggaggcggctcgggcggcggaggaggaggccgaccgggcgctctacggcgccttccgcggcgccgtcaactctctctcgcagctatacacgctcgtctgtgcccaacagcgcctttccttcacgctagcaacttactgaaccttgcaaaaactctaccaagcgaggtctttctttccaagaaaaacttggcactctccttggcaaaaggcaaggattacaaacagtttcaaactttttacgaagaaggaactgaatagccatctcggatctaat

SEQ ID NO: 42754 - DNA, 510 bp, Oryza sativa
  Clone ID: uC-osroM202023h12b1
tcttcttcccccaatcgtctccaactctccatgggccatagctttctctcatcttcggccctgcaggctgcggcctcatcgctcgtccctgcagcctcccgctgtcctgccagattatctgcctttgtttgtttgatggcctcacctgcatcaccgagagagttcactcaggaagctgcccgtcagtctctgattgcgatctcccggtctgttccagcggcaggagaagccgtcaacatcaagtcaccgagcggcgccatggtgaatggccaccaccacgacgatgacggggcagagaagtacagatcaaagctcatctccatctccaacctgtcgcctgatgcccagcctacgccgtgctctcccaaggacaccgctgctgcttaggcttaattaaccgtgtgaccatgttactgcttacacttccaagtgtggatatcgtgtcccagcgtgtgtcgctaaatgctgagactgtgatcaagaccctttgccttaataactgccatgact

SEQ ID NO: 42755 - DNA, 163 bp, Oryza sativa
  Clone ID: uC-osroM202024a02b1
gtgagattgtagcgagggtagctcgccacagcgtgttctttgctttgaggcgccagcgcagtcgagcctgcaggctgccacgcccggaggatactatctatcattttggcaccgcgatggaactctaacagagtaccctggtataccatgacagagaccctgt

SEQ ID NO: 42756 - DNA, 168 bp, Oryza sativa
  Clone ID: uC-osroM202024a03b1
tttagtgtccgcccttagtatccaagcatgcaggggcttaaaccaactgatactgtaccatcactgcgctgaataccgacgcacaagccgggatctgctgataagagtccaatatgaaagtcttcaaaacgccatcatggcgagacgttcatcacattcacagcggtt

SEQ ID NO: 42757 - DNA, 412 bp, Oryza sativa
  Clone ID: uC-osroM202024a04b1
ttcacctttaccctcaacttctccaagggttccagccaggtcattgcacagtattaccaactaatccgcctaggctttgaggggtacaagaacatcatggagaactgccaggagaacgcgatggtgctgaagcaggggctggagaagacggggcggatcaacatcgtgtccaaggacaacggcgagccggtggtggccttctccctcaaggacagcgcccggcacaaccagttcaggatctccgacttcctgcggcgcttcggctggatcgtgccgggctacaccatgccccccgacgcgcagcacgtcaccgtgctccgagtagtcatccgcgaggacttcaggcgaacgcttgccgagcgccttacgcttgacgtcgagaaggtggttcacgagcttgaagcgcttcccg

SEQ ID NO: 42758 - DNA, 429 bp, Oryza sativa
  Clone ID: uC-osroM202024a06b1
tctaaatttcctttgcgtcctctcgattcctcagcaaccatgtcggcctactgcggcaagtacaaggacgagctcatcaagaacgctgcctacattggcactactggcaaggcgatccttgctgatcatgagatcagtgcgaccatcggtaagcgctttgccagcatcaatgtcgacatcgttgaggcgaaccgccggtctctccgtgagctgctcttgaacacccctggtgccctccagcaccataagggaggtgatcctcttagaggagaccctgtaccagaagaccaaggacggcaagccctccatggatgttctaaaggaggccggagcacatgctggaattcaaggcagacaaggataccgttgatgttgaccgccccaccaaggagaccaccacccagggccacgatgatcttggcatgcgtt

SEQ ID NO: 42759 - DNA, 478 bp, Oryza sativa
  Clone ID: uC-osroM202024a07b1
gtgttgacttcgacacaatctatcgatgtcgatgccgatgccaatactcctcctcctcctgctcctcccccagggccagggccacggcggcgccggcgacatctgcatcgtgggcagcggcatctccggatcatccaccgccttcttcttcaccaactacaccaccgccctctccggtgcccagctccgcgtcttcgagcgccgcgctaaggtcggcggccgcctcgccaccgtcaccgtctccggcgatcacttcgaggctggcggctccatcatccacccacgaaatctccatgtgcgccgcttcgccgacctgctaggcctcgaagccaagaccgatggcgacgatgactggctcgggatttgggacggccaccgcttcgtcttccagacgctccgcccgctaccgcccgggacgtcctggctccgccgcaagctgcacacccttgttaactcgctgcgcctctttagcgctatg

SEQ ID NO: 42760 - DNA, 467 bp, Oryza sativa
  Clone ID: uC-osroM202024a10b1
ttacgccggactctccccttctctctgtctcgctccttcgttcgctcgctttatcccccccgaataaaggcgagaagccgcagcggcggacgaagaagagggcagatagaaatggcggcggagacgttcctcttcacctccgagtccgtgaacgagggtcacccggacaagctgtgcgaccaggtgtcggacgcggtgctcgacgcgtgcctcgcccaggaccccgacagcaaggtggcgtgcgagacgtgcaccaagaccaacatggtgatggtgttcggcgagatcaccaccaaggccaccgtcgactacgagaagatcgtccgcgacacctgccgcggcatcggcttcgtgtccgacgacgtcggcctcgacgccgaccgctgaaggtgctcgtcaacatcgagcagcagtcgcccgacatcgggcagggggtgcacggccacttcaccaagcgccccgaggag

SEQ ID NO: 42761 - DNA, 253 bp, Oryza sativa
  Clone ID: uC-osroM202024a12b1
ttcaccgcgtagatgatgcacgtcgcccatatcgggaacagccgcagcacgcctctcagctcctctcggtggtcgccgccgtcgtcatcgtccacgacggcaagagcgtcgtctttggatcctctgatgagcgcgacgaacgctctggcgaggcgagcgaaggggctggactgggtggagacgtagtagcggtagttccttgtcccgagcaagaacattgcgagggcgaacgccatgaccaggcatgggatgc

SEQ ID NO: 42762 - DNA, 469 bp, Oryza sativa
  Clone ID: uC-osroM202024b01b1
gtgaacgtgaagggtgactactacaggtaccttgccgaatctaagaccggggctgagaggacggatgctgctgagaataccatggtggcatacaaggctgctcaggacattgctttggctgagctgcctgctactcatccaattaggcttgggctagctcttaacttctcagtgttctactatgagatcctcaactcgcctgatcgtgcttgcaacctcgcaaagcaggcttttgatgaggccatctcggagctggacaccctgagcgaggagtcctacaaggacagcactttgatcatgcagctactccgtgataacctgaccctgtggacttcagacatctcggaggacaccgcggaagagatcagggaagctccgaagcgcgactccagcgaggggcagataagccggctttatgtgccctagaagcttgtagctagcgctttgctactgtgtaaagacacctatg

SEQ ID NO: 42763 - DNA, 491 bp, Oryza sativa
  Clone ID: uC-osroM202024b02b1
ccacgccccaccgtctactttcaacaaggggcgtgagcgtggccgtggtggtgttgatggcgatggcggcggtggcggaggcgcaggctcccgctgccactccgacggcgggcgccacggcgccgtcgaacgtgacggcggtcctggagaagggagggcagtacacgacgttcatcctgctgatgaaggagacgcaacaggacacgcagctgaacagccagctgaacaactcctttaacggcaacggttacaccgtgttcgcgcctaccgacaacgccttcaacaacctcaagccgggcaccctcaacagcctgacgcaacagcagcaggtggcgctcgtccagggccacgttctcccgcagttctacttcatggactcctttcagacggccagtaaccccgttcgcacccaagcgttcggcaccgacggtccctacacccttaacatcacctccaccaccaacaacaacctcaacgtcttcaccggcgtc

SEQ ID NO: 42764 - DNA, 478 bp, Oryza sativa
  Clone ID: uC-osroM202024b03b1
tcacactttctacccccaaacttgccctccaatctatctccgccgccgccgccgcctccgccgcgagagggcgtcgccgagctgcgcgggaggctcgcctcccgcagcatctggccggattcgtcgtagtcgaggcagctgtaagcgagagagagggagatggccgcggccgccgggaaggcggcgatggagcggcaccagtcgatcgacgcgcagctgcggctgctcgcgccggggaaggtatccgaggacgacaagctcgtcgagtacgacgccctcctcgtcgaccgcttcctcgacatcctccaggacctgcacggccctcacctccgcgaattcgtgcaggagtgctacgagctgtcggcggagtacgagaacgacagggacgaggcgcggctcgacgagctggggaggaagcttaccagcctgccgccgggggactccatcggccgcttcagcttcttttcgcaccatgctc

SEQ ID NO: 42765 - DNA, 425 bp, Oryza sativa
  Clone ID: uC-osroM202024b04b1
ttccattttatcagtcttccaaaaaacaatcgaccacagccttacctggtgctggtgaggtgagcagagctatcccaattccaattccaattcacaattcccaaagtggaggagaagatggtggcgccgtcgcccgacgccgggaagccgctggtgatcctgccgcggccgctctacccggagttcgctgccgcgctggacggccgcttccgctttgtgcttgccgccgacgcccacgagggcaacgcaacaaaagccagggccctgctcgtgccggctttgacgcctgtgtccgctgatctcgtggcttggctccccaagctggagatccgtgtggccacgtccaccggcgttgaccacattgacctctacgcgtgccgccgccgcgggatcaggggtaccaacgccggcgaggtgtttgcccc

SEQ ID NO: 42766 - DNA, 277 bp, Oryza sativa
  Clone ID: uC-osroM202024b05b1
tttccattcgcgagaacttgtcgggatatttatgagcgctggtggagtggcgtggcgagaatggaatggaagttattcgatgatttcccaggattttgactaggccacagatggttacaagttgcattcatggtcaaaattgtgtctgaacatagagattctttggagttcatagacgaagtgatttgttttgttcaatacttccacacttataatgggtgctgtctgctcaaggaagagaagccaattagtgcacgaggatgactctttccagaca

SEQ ID NO: 42767 - DNA, 260 bp, Oryza sativa
  Clone ID: uC-osroM202024b06b1
tttaaggttatggcaaaggagaaataacagctagcgggcttggggaagggaaaacagcaagtgggagatcggcagggagaggtgaattactacttgagtagaagtggtacaagaagagtcgtcgtctacctgtgagcgaattatttcgaggttgtgcgttgcgatgatgggaggtggtctggtgatggaccagggcatgatgttccccggagcgcacaacttcgtggatctcctgcagcagaacggcggcgacaagaacc

SEQ ID NO: 42768 - DNA, 480 bp, Oryza sativa
  Clone ID: uC-osroM202024b07b1
tttgtccgttctcctcctcccttctcgcggaggccgccgcaaccaaaaaaaaaaaagtctaaccctagatccaggccccgcgtctccggcgatctcccggccatggcgactcgccgggccctctcctccctcgtccgcgccgcctccaggctccgcggggcctcgcccgccccgcgcccgcgcgggccgctccaccgaccgtcgccatcggggtacctattcaaccgcgccgccgcgtacgccacggccgccgcggcgaaggaggcggcgcctcccgcgcccgcgacggggaaggccacgggtggaggtaagatcaccgacgagttcaccggcgccggcgccgtcgggcaggtgtgccaggtcatcggcgccgtcgtcgacgtgcggtttgacgaggggctgcctcccatcctcacggcgctcgaggtgctcgaccacaacatccgcctcgtgctcgaggtggcgcagcaccttggcgag

SEQ ID NO: 42769 - DNA, 320 bp, Oryza sativa
  Clone ID: uC-osroM202024c05b1
ttattttcggtcttggagctgttggtcttgctgctatggaaggtgccaggctgtctggagcatcgaggatcattggtgtggacctgaaccctgcgaaattcgaacaagctaagaagtttggctgcactgacttcgtaaaccccaaggaccacagcaagccagtgcacgaggtgctgattgagatgaccaacggtggactcgacagggccgttgaatgcacgggcaacatcaacgccatgatatcctgcttcgaatgtgtccatgatggatggggcgttgcggtgcttgtcggcgtgcccaccaaggatgatgtgttcaag

SEQ ID NO: 42770 - DNA, 444 bp, Oryza sativa
  Clone ID: uC-osroM202024c06b1
ttccgctttttttttttttttttacaagatcaaatatactgtaaccactttatttgtcacactggtgttcgtaaggttcgggtgaagtgaaaacaaaacagtgagcagaaccaaaatcgtcactgcttagctccgagctgaacgcggctgggctaacgaaggaactgacaagctgacgaagtgaacgccgatagcccgcgaggaccaaattctcatcggccccgatcatggctcgcacgagcatcccctgccggacgacgcggctcggaaactccgatcccactggtccacaggcgcagcttcagcgtgagggacatggcgcgggtgcttctccctcttatcaccctttatctgcttcagggcgtgtttcagtgctggaagaagcgcctacatgcactccgaacggcgtttgggttcccgggcatgttgatgataagtgttgat

SEQ ID NO: 42771 - DNA, 287 bp, Oryza sativa
  Clone ID: uC-osroM202024c08b1
attgcttcgtttgcgcttggccacccaccatttcggcgcggagaggagaccgcttcacccgccgatctgcgagaaaccctctccgcctcgcctcctccacctcccaatcttaacccaacctccccccttcctctcgcgtcgaccccttgctttgctcctccttcaaccttcttctttcttggagtttcttgagagaaagagagagagagagagagagagagagagagagagagagggggcaggcggccccatgaggaggaggacggcggcgtctgctgcgactgacg

SEQ ID NO: 42772 - DNA, 451 bp, Oryza sativa
  Clone ID: uC-osroM202024c09b1
tctctctctctcctcgcggatgcaaatcgagaggaagaggaagacgagaggagaggagagcgcgtggcgtcgagaggaaaagccggagccattgagccgcaggcctcctcctcgcgcgcgagcgcggccggcatctccggctcggatcgagcttgaaggagaaattgggggcttgagctgaaagatcttggtacaattctcccgcaaaatgcctggaattatcgtggatggagttgtcacagaggaggcacaaaacgaggtgaactcctcgcagaacaaggacaattcgtccgccccaagatcgccggtggcttcgaaaagcatgcacagcgaggcgctggagatgcatgtggagggtttcggcgccggggagccatcgattgagcagctctacaacaatgtgtgcgagatggagagctcaagcgagggtggatcccccttgcgggagagc

SEQ ID NO: 42773 - DNA, 292 bp, Oryza sativa
  Clone ID: uC-osroM202024d02b1
ttaaaacttgttcccctctccaccgccggagatggcgacccaaccccgagccggcgacggcgcggaggcggcggcggcggcgaaggaggcccccgccgtgtcctacttgcaggcctgcgtcgagctcgacgactggtggctggagagggctgaaggcgaggaaggcaaggtccgcgtcgtcggcttcaacaccacgacgagtcgagctggtagaagattcacttctgcttccattaaaacacggcatgctagtggtgaccttgagactggagaaggtatcatcataatgatt

SEQ ID NO: 42774 - DNA, 389 bp, Oryza sativa
  Clone ID: uC-osroM202024d04b1
tttccactttatttctgagctcttctagtttgagtgagagagcagtagaagggagtagtgcaagatgccgatccgcaacatcgccgtggggagccaccaggaggtgtaccacccgggtgcactcaaggcggcgttggccgagttcatctccaccctcatcttcgtcttcgccggccagggctccggcatggccttcagcaagctgaccggcggcggagcgacgacccccgccgggctgatcgcggcggcggtggcccacgccttcgccctgttcgtgggggtgtccgtcggcgccaacatcttcggcggccacgtgaacccggccgtgaccttcggcgccttcgtcggcgggaacatcaccctgttccgcggccttctttactggatcg

SEQ ID NO: 42775 - DNA, 174 bp, Oryza sativa
  Clone ID: uC-osroM202024d05b1
tttgttcgtttcccgtatcggtagggtgaggccaatattctctctctctggaacactctgtgggctggcacttgccaaaatgattgagtcaaacacgagtggtgatgggacatggagacggatgaagcgctcggatccgacgacgcactcggccaccggatgcaactggcggcc

SEQ ID NO: 42776 - DNA, 371 bp, Oryza sativa
  Clone ID: uC-osroM202024d06b1
ttctactgtgccgccggcgctcccctctctctcccacccaccgccgacgcccctcttcgcccctggatctggcggctggccagcggcgatgcggcgccgaggcggtctcggcggtgtgcctgcgacggacgacgcggcggagatcggcggcggcgcgggagctcggtcggtggcgcggtcgtcctcgcggagctcggtggtggcgcgggaggagtggcgaggtgcgacggcgactgcgcctcgagaagcggcgaggtcggcggcggcaggcacccggcggggctttcttcttttggcatcaccatggtcgctgggcgggggcttacttcgggccgaccggtccttggcaactttattgttttccctcccat

SEQ ID NO: 42777 - DNA, 411 bp, Oryza sativa
  Clone ID: uC-osroM202024e01b1
ttagacttttcgtttacgagttcatgacgaggggcagcttggagaagcatctcttcaaaaagtacgcagcgtcgttgccatggtcaacacggttgaagatcgccataggtgccgcgaaagggttggcctttctccatgaagccgagaagccggtcatctaccgagacttcaagacctccaacatcttgctagactcggacttcaaagccaagctctcagatttcgggctagcgaaggacgggccagaggatgacgagacgcatgtctcgacacgtgtcatgggcacacagggatacgctgcaccagagtacattatgacagggcatctgactgcgaagagcgacgtgtaccgcttccgcgtggtgctgctggagctgctgtccgtgaggaagtcggtggacaagagccggc

SEQ ID NO: 42778 - DNA, 426 bp, Oryza sativa
  Clone ID: uC-osroM202024e02b1
ttcagagttatgagagagagagagcagcagcaggtagcaggtcgaggagggtttgtggccatggcgatcctgtcggatgtggccaccgaggtgctgatcccgatcgccgccatcatcgggatcgggttctccatcgcgcagtgggtgctggtcgcccgggtcaagctggcgccgtcgcagccgggagcgtcgaggagcaaggacgggtacggcgactcgctgatcgaggaggaggaagggctcaacgaccacaacctcgttgacaagtgcgccgagatacagaacgccatcgctgaaggagcaacatcgttccttttcaccgaataccaatacgttggcgttttcatgtcgatattcgcggtggtgatcttcctcttccttgggtccgttgagggaattagcccaaagacccacccctgcacatac

SEQ ID NO: 42779 - DNA, 464 bp, Oryza sativa
  Clone ID: uC-osroM202024e04b1
tttcagtttcttcctcctaatcttgatactagttgatgggtggttgacgtttcatcgagctatcctagctcaaggcttctctatccctttctactctcccactcctctctaaccactgtactatatactagcactgaagctggacactgatacaaaattccgtactaatattgacaactgactacctatactggtgtggcaccattatatacctcttctcccgcctgccattactaaccaccagccggagctacattgcttcgagatgatgggaattcagagaatttgcatcgttcttgggatgctttttatacttgtgagagagggtggagctgtgacattcacgttcgtgaaccggtgcaccgggacggggtggccgggcattctgtcgaacgccgggagcgcgaggatggaccccacggggtttgagctggcgcccggcgcggcgcgcgcggtgcccgctc

SEQ ID NO: 42780 - DNA, 453 bp, Oryza sativa
  Clone ID: uC-osroM202024e06b1
cgtttgttgagcgcattttgggtcttgataatgataggatgggcgacctcattggagcactattgctggcgaaagttgtggatctactgactgaattggatgttaacataacttgggaagatatactccaagatgaacataacaaaggtatatttgatatggagcttgaagatttgggtgaggatgaggacagccttggacaagaaggaacaaaggccctttttggaggaaatgcttgtgctgaaaagcttgatggtttaatggttgttttttgtgagcacctcaagtcatgtaaagaacatggtcgcttaccccaggagtttgacattctgaagactatctttcgagcatctgtgctaagggtgcacaaatccaaatttgcacagtttatcatgttttatgcctgcttactggatcctgaaatctgtggccttgaattcggtctcttcctct

SEQ ID NO: 42781 - DNA, 470 bp, Oryza sativa
  Clone ID: uC-osroM202024e07b1
ttttcttcttagctcttcctcccattccttcttcgattcattcctgtctccaattggaggtcacaattgcagcttgcagctagctcaaatttccattttttgtttggttgtctctcggcagcaaagcagatatagagcagaggaaagctaagctaaattagttagttagattactagtctctggcagctgggtgatcttaatttgatcaaagaagaagaagaagaagcaagtttttttagctcctgagtatattataggattaactactactaggatagtactcctatatgagaagaagatgatgcgcgggaaggatcagaaatttccggcgatgaagaaggagacggcggccgtggcgaaggaggaggtgtgggaggtgcggcccggcggcatgctggtgcagaagcggagcccggagtcggagccaccgccgggcggcgcgccggtgccgacgatccgggtgaaggtg

SEQ ID NO: 42782 - DNA, 453 bp, Oryza sativa
  Clone ID: uC-osroM202024e09b1
ttacctcccccctcccccacacacatctccccgactcgatctccccctcctcctccgccgccgccgccaacgcctcctcctccgcctcctcccccaacgcatcgccccaccccatccatccagattcctccctcctcctcctcctcctcttcctcctcccccgatcccgccccgatgcgatgcccccgcggcgcgatcgcgtgacgccgccatgatgaatcccgacggcggcgacggcgaccgcctcgaggcggcgggggcgggctcgtcgtcggcgcagcaggggcatccgacgatggagtggcggttcgcgcaggtcttcggcgagcgcgcggacggggaggacgagcaggaagtcgacatgatctctgcaattgagattgataaatctggggatcatcttgccaccggagacagatgaagacgtgttgttctattttgaaggacagatgc

SEQ ID NO: 42783 - DNA, 482 bp, Oryza sativa
  Clone ID: uC-osroM202024e10b1
tttgtccggttcttcttctcatctcctcccactccagctctgcccctgagccaagaactgagcagcagagagctcgtggtctctttgccagcttctcctcagtcctcaccaagctgttcttgcagagaaaacatagccaaagagctaatttgagctcccaccatgaagtacgtgctggtgacaggaggggtggtgagcggcctcggcaagggcgtgaccgcgagcagcatcggcgtcgtgctcaaggcctgcgggctccgcgtcaccaccatcaagattgacccatacctcaacactgatgctggaaccatgtctccgttcgagcatggtgaggtcttcgttttggacgatggtggagaggtggacttggaccttggaaattacgaacgttttctggacatcaaattgacccgtgataacaacataaccacgggaaaaatatatcagtcagtcattaacaaagaaaggagaggagactactt

SEQ ID NO: 42784 - DNA, 420 bp, Oryza sativa
  Clone ID: uC-osroM202024e11b1
ttcttccgtttctgcgttggccattatgctcttcaatgttcatggatggcataacttgttctggttctctacaatcccccttgtagtaactttagcagttggaacaaagctgcaggctataattgcaatgatggctgttgaaattaaagagaggcatacagtaattcaaggaatgccggtggtgaaactcagtgatgaacatttttggttcgggaagccacgtctggttcttcatcttatccatttcgcgtcatttcagaatgcatttgaaattacatacttcttttggatttggtacaaattcgggttgagatcctgcttccatgacaactttgagcttatcatcgccagaatctgccttggggtttgcgttcaattcatgtgcagctatatcacaactgcactctatgctctcgtatc

SEQ ID NO: 42785 - DNA, 433 bp, Oryza sativa
  Clone ID: uC-osroM202024f04b1
tttccttttcctccggctcttcttcagtatcgaatcctctcttctcctcgtgcccaccaccaccaccgtagcaatggcgggcaacgggccgatcaacaaggaggacccgctcaactggggcgcggtggcggccgagatggccggcagccacctcgacgaggtgaagcgcatggtggcgcagttccgcgagccgctggtcaagatccagggcgccaccctccgcgtcggccaggtggccgccgtcgcccaggccaaggacgccggcggcgtcgccgtcgagctcgacgaggaggcccgcccccgcgtcaaggccagcagcgagtggatccttaactgcattgcccacggcggcgacatctacggcgtcaccaccggctttggcggtaacctccaccgacggaccaggacggacccgccctccaagtcgagctcc

SEQ ID NO: 42786 - DNA, 473 bp, Oryza sativa
  Clone ID: uC-osroM202024f05b1
ttcacgtttggtgagtcgagtgagctagccatagctagctatgaagaaggcggccgccggcggcatggcgcctcttcctccgtcgtcgtctcctccgtcgtgcaaagccggcggtggtggtggcagcccgaggtggtcgttgcttcacggcggcggcggcgagtggggcgtcgtggtgcggcggaacgtcgtcaagtcgtcgtcgctgctgctgctggtgttctccaccttcttcgtcttctccgtcttgcgctcgtcgcagacgagcttagtcccgccgccgccgccggctgctgccggccccggcgagccggcgctggcgcagagtggtcacgacgttgccggcgatgatggcggcgaacatgttgccgtcgcaatcaacaatgtggcagctgagacgcaaagcacgcccgatgacatctcgctgccgtcgacgaacttattgggtgcagctgtttcacaacaccaacaaa

SEQ ID NO: 42787 - DNA, 469 bp, Oryza sativa
  Clone ID: uC-osroM202024f09b1
gttcttcttctcatctcctcccactccagctctgcccctgagccaagaactgagcagcagagagctcgtggtctctttgccagcttctcctcagtcctcaccaagctgttcttgcagagaaaacatagccaaagagctaatttgagctcccaccatgaagtacgtgctggtgacaggaggggtggtgagcggcctcggcaagggcgtgaccgcgagcagcatcggcgtcgtgctcaaggcctgcgggctccgcgtcaccaccatcaagattgacccatacctcaacactgatgctggaaccatgtctccgttcgagcatggtgaggtcttcgttttggacgatggtggagaggtggacttggaccttggaaatacgaacgttttctggacatcaaattgacccgggataacaacataaccacgggaaaaatatatcagtcagtcattaacaaagaaaggagaggagact

SEQ ID NO: 42788 - DNA, 310 bp, Oryza sativa
  Clone ID: uC-osroM202024g02b1
ttggcgctttcgtcacatattcagaggtcaaccacgaagacaccttttgcagagtggctggagtgtgtttgttagtgccaaacggcttgctgctggggatgcctttatctttctcagaggtgagaacggggaactgcgtgttggagtcaggcgtgcaatgaggcagcaaactaatgttccatcttcagtgatatcaagccacagcatgcatcttggggttcttgccacagcatggcatgctgttaacacagggaccatgttcactgcctactacaagcctaagacaagtccagccgagtttgtggtccct

SEQ ID NO: 42789 - DNA, 396 bp, Oryza sativa
  Clone ID: uC-osroM202024g03b1
ttcattgtttcgctcgagtgctccgctcggctcgctgcgaggttggtgctccgcgggtccacgcggcgttgcgagagtgagagagagaggacgaggtcctcctccttccgcgtcccccgctcgctgcttcatccgcttcttcctccctccatcttcgcttgtgagctcctccgcgcgtcgcgagccttactgaaacttctgatccctccgaaaccgagaaaagaggggaatctgtgaagagattttagcagcagtgcaatggaggtatttggaaaatccgtgattgctgagcccagcaatgtgatttacttgtccagcattcttaacacagaagggccaatccctagtcacaagtgtgacaagaaatgccagaacgagcacgttctttggcaacat

SEQ ID NO: 42790 - DNA, 419 bp, Oryza sativa
  Clone ID: uC-osroM202024g04b1
ttcattgttccgctcgagtgctccgctcggctcgctgcgaggttggtgctccgcgggtccacgcggcgttgcgagagtgagagagagaggacgaggtcctcctccttccgcgtcccccgctcgctgtttcatccgcttcttcctccctccatcttcgcttgtgagctcctccgcgcgtcgcgagccttactgaaacttctgatccctccgaaaccgagaaaagaggggaatctgtgaagagactttagcagcagtgcaatggaggtatttggaaaatccgtgattgctgacccccagaatgtgatttacttgttcagtattcttaacacagaagggccaatcccctagtacaagtgtgacaagaattgccagaacgagcccgtctttggcaacatgtaccgttgcaaactgaccgggac

SEQ ID NO: 42791 - DNA, 375 bp, Oryza sativa
  Clone ID: uC-osroM202024g05b1
ttcatcttcctccttccctcctataggaatccaaacccgccgcatcccggttcatgtcctgccgctccccatgtcgccgcccctcgagctcgactacataggcctctcgcctccgccgccgccgccctcctcctcctccgccgccgccgcccgcgcggacgacgtcgacctgaagggcaccgagctccgcctcggcctccctggctccgagtcgccggaccgccgccctgcggctattgccgctgccgctgccactgccaccacccttgagctgctgcccgccaagggtgccaagcgcgtgttccccgacgaggccgcgctgacgccgcccactgccgccgccgggaagggcaaggcggcgagggagggggagga

SEQ ID NO: 42792 - DNA, 474 bp, Oryza sativa
  Clone ID: uC-osroM202024g09b1
tttcgaccacgagatcaactccaggatctacctctggaggggccacccctggaacctggaggtcgacgctgtcgtcaactccactaacgagagcttggacgagtcgcacagcagtcctggtctgcacgccgcggcaggatcggggctcgcggaggaatgctccaccttgggaggatgccgaactgggatggcgaagatgaccaatgcttatgatctgcctgcaaggaaggtcattcatacagtcggccccaaatatgctgtcaagtatcacacagctgcagagaatgcacttagtcactgctaccgttcttgtttggaactcctcattgaaaatggccttgaaagcattgcaatgggctgcatttacacgaagctaaaaactaccctcgtgagccagctgcccatgtggcgataagaactgttagaccctttctggagaaacataaagcaaaatgctggtgttgttttttgact

SEQ ID NO: 42793 - DNA, 197 bp, Oryza sativa
  Clone ID: uC-osroM202024g10b1
ttttccgtttacttgtaaactcccaaaaagcaatcgcgcactcggtgaaccctagcccggcgatggggtgcgcgcaggggaagtgctgcgtgccgcggcggtagaggggacgcggtggcggcggagcggtgggtgggcgcggcggcgcgacgctggggcgggtggcggtgccgggggcggcgctggtgctggagtac

SEQ ID NO: 42794 - DNA, 478 bp, Oryza sativa
  Clone ID: uC-osroM202024g11b1
tttccgttttgcgtttgcactcctctcgatctccattcgtttttgagttcctcgtttgctccgcctctctttcactcatgggcaagattaagatcggaatcaatgggttcggccgcatcggcaggctggtggccagggtggcgctgcagagcgaggatgtcgagctcgttgccgtcaacgatcccttcatcaccaccgagtacatgacatacatgttcaagtatgacaccgtccacggccagtggaagcatcatgaggtcaaggtcaaggactccaagaccctcatctttggcacgaaagaggttgcggtgttcggctgcaggaaccctgaggagatcccatgggctgcggctggtgctgaatacgttgttgagtctactggtgttttcaccgacaaggacaaggcagcagctcacttgaagggtggtgccaagaaggtcgtcatttctgttccagcaaagacgccccatgttcgttg

SEQ ID NO: 42795 - DNA, 414 bp, Oryza sativa
  Clone ID: uC-osroM202024h01b1
ttcacacgctcacacatcgatcgtcattgtcttagctagctaatctttctttctcctcggttaattatcctttgcatgcccctctccaagctcggacgctgcaagctaagatgggtccgaggattcagcagctggccgctgtgttgctggcggctgtcgtcgtcgtcgcagccgccagggatgaacctgcaggaaaaaactaccaaactcaatgggatacagtgatgtcaatacttaactgcaagagtgattcgttgatccctagctacatctgcagcgtgatcagcaaaactcgctggggttggagctcagatgaccccgacgactacacgccggcgggggatccgtcgccgacggcggcgaggccgttgaggagcacggcggacctagccaagtacgtggacccgctgccgc

SEQ ID NO: 42796 - DNA, 424 bp, Oryza sativa
  Clone ID: uC-osroM202024h02b1
ttttgcgttctctcgattcctcagcaaccatgtcggcctactgcggcaagtacaaggacgagctcatcaagaacgctgcctacattggcactcctggcaagggtatccttgctgcagatgagtccactggcaccattggcaagcgctttgccagcatcaatgtcgagaacgttgaggagaaccgccgctctctccgcgagctgctcttcaccacccctggtgccctccagcacctaagtggtgtgatcctcttcgaggagaccctgtaccagaagaccaaggacggtaagcccttcgtccatgtactcaaggagggtggtgtcctacctggcatcaaggttgacaagggtaccgttgagggtgccggtcccaacaaagagaccaccacccaaggccacgatgatcttggcaagcgttgcgccaa

SEQ ID NO: 42797 - DNA, 312 bp, Oryza sativa
  Clone ID: uC-osroM202024h03b1
cccactcgtgcgttcaactgatgccaggggagcactgaaattcaagtgccacaagtaccaataccccaaccctttgttacaacagcatgatggccagagctcagttgaccacatttctcatcgtcactagcttcctctctactggcccctatctcagggcaccggagcatggtggcgtcctcactagctaccatgtttcttctttggatatcatgtccaaaatccacactgatcatgacgcgactaccaaggcatcatcggactttggccatattgtacatgctacaccaaacggggtatttcgtcctacct

SEQ ID NO: 42798 - DNA, 417 bp, Oryza sativa
  Clone ID: uC-osroM202024h05b1
tgttcagttcgatttcgatcgaatttcacccaaagtccacacaaactttcgattcgatttctccgatctcgcagcggtggcggccatggcgcacaggacgctggagctgacgctgatctcggccaaggatctcaaggacgtgaacctcctctccaagatggaggtctacgccgtcgtctcgctctccggcgaccgccgctcgcggcagcggatcggcaccgaccgcgccggtggccgcaacccggcgtggaacgccgccccgctccggttcaccgtcccggcctccggcgcgggttccctccacgtgctcctccgcgccgagcgcgccctcggcgaccgcgacgtcggcgaggtccacatcccccttttggagcttctctccggcgcccccgaccgcgccgtccccgccaagttcgt

SEQ ID NO: 42799 - DNA, 403 bp, Oryza sativa
  Clone ID: uC-osroM202024h06b1
tttgaaatcctctcctctcttctcctcctcctcctctcctcgctcgtggccgccaccatgtcaggcggcctctacaaccaccagggtttctccccggcaagaaccctctcgccccagattaggagcaaccccgaggccgatagccagtacttgagcgagctgctcgcggagcatcacaagctggggcctttcatgcaggtgctgccgatatgcagccggctgctcaaccaagaaatcatgcgggtatcaagcatggtcaacgaccatggattcaacgattttgacaggcgttgttatagaagtcccagtcccatggctttcgcaattatgagacccaacctacatgggcatggatttgggccttggaaggcatacaccaagagagattaggcttttctcctcc

SEQ ID NO: 42800 - DNA, 451 bp, Oryza sativa
  Clone ID: uC-osroM202024h07b1
ttccatcgaatcagtcttccaaaaaacaatcgaccacagccttacctggtgctggtgaggtgagcagagctatcccaattccaattccaattcacaattcccaaagtggaggagaagatggtggcgccgtcgcccgacgccgggaagccgctggtgatcctgccgcggccgctctacccggagttcgctgccgcgctggacggccgcttccgcttcgtgcttgccgccgacgccgacgagggcaacgcagcagaggcgagggccgtgctcgtgccggctctgacgcctgtgtccgctgatctcgtggcttggctccccaagctggagatcgtggtggccacgttcaccggcgttgaccacatcgacctcgacgcgtgccgccgccgcgggatcagcgtcaccaacgccggcgaggtgtttgcccccgacgtggcggactacgcggtccggc

SEQ ID NO: 42801 - DNA, 486 bp, Oryza sativa
  Clone ID: uC-osroM202024h08b1
ttcaactcatgcaagtagtgtactcaaattcaagctacacaacttacaatatcccaaccctttgttacaacagcatgatgcccagagctcagttaaccacatttctcatcgtcactagcttcctctctactgtcccctatctcagggcaccggtgcatggtggcgtcctcactagttacgatgtttcttctttggatatcatgtccaaaatccacactgatcatgacgcgactaccaaggcatcatcggactttggccatattgtacatgctacaccaaacggggtatttcgtcctaccttccctgctgacatcgctgccctaatccgcttatcactctctcagccgacacccttcaccgtggcaccacgaggcaagggccactcctctcgaggacaggccttcgccccgggcggcattgttgttgacatgtcggctctcggtgatcacggtcaccataccagtcaccgtatcgacgtgtcggttg

SEQ ID NO: 42802 - DNA, 484 bp, Oryza sativa
  Clone ID: uC-osroM202024h09b1
tgagttgcgaccttgctggaaaacttgtacctagagctagctgaaggaagcaatatggccaccgtggatggcacaacggcgccgagctccggcggcaagacggcgacggtggcgttggagtcgggcggcggccgctacggtgggccggctccggcgaaatgctccggcgccaacctggccctgagggcgctgctcttcgccgtgtcgctgtccgcgctcgtggtgcttgtcaccgccaagcagacggtgatggtcccgttcgtcatccggccgccgcagttcatcctcgcgccggtccccgccaagtacacgcactcaccggcgctcatatatctgctggctgcgctgtgcgcgacgtgcttttacagcctgatcacggccatcagctcggtgaggttgctctccagctcggcttgctctgccaagacgctcttctaccttatcctgcttgatgtgttctacgcagccgtgatggcgtcggcga

SEQ ID NO: 42803 - DNA, 459 bp, Oryza sativa
  Clone ID: uC-osroM202024h10b1
gtgattggatttgattgtgaaggcgtagacctttgccgccatggtgctctctgtatcatgcagattgcatttcctgacgctgtttacttagttgatgctattgagggtgggaaagaacttattgaagcttgcaaaccagcacttgaatcagaatatgtcaccaaagttattcatgactgcaaaagggacagtgaggctctgtatttccagtttggcataaaattgcataatgtgatggatacacagatcgcttattctctgttagaggagcaggaagggaaaaagagaggatacgatgagtacatatcttttgtcagcctccttgctgatccccgatattgtggaatggcatatcctgaaaaggaagaagtccgtacccttttaaggcaggaccctaacttttggacgcataggcctttatctgaaatgatgattcgagcagccacagatgatgtccgc

SEQ ID NO: 42804 - DNA, 469 bp, Oryza sativa
  Clone ID: uC-osroM202024h11b1
tttccgttcctcctcccgaggcgtcgcagccgccgccaccctgacacctctccccgccgtcgcgccgccggcgctcgcggcgcccatccaccgtccacctgttgccaccgccgcatgcgccagagggaggcctagcgcgctcgcggatccctcctcctcctcgcctcgcccgacgacgacgcggcttccagcgatgcatcgcgcgatgcggctgcgcggcctcctgcgcccgcagctcctgcgcacgcatgagaccggaggcgcgcttgtcgtggggctcggagagcctggcgggagcgcggtggcgcggaggccgcctcccctgcctttcggcgacgggcggcggcggccgtcgtcccggttctactgctccagggcggcgtctgcagcgtggaggctgctgtggggagcggcggaggcggtagtagtagcagcagcagcgagcaggagcacgcgcggctcggggaga

SEQ ID NO: 42805 - DNA, 420 bp, Oryza sativa
  Clone ID: uC-osroM202025a07b1
tttctccacctcctcctcctccccccgatcggatcggcccggctcctcctcctccgccgccgccaccgccgccgcagataggagaagatggccgcacttgataccttcctctttacctcggagtctgtgaacgagggccaccctgacaagctctgcgaccaagtctcagatgctgtgcttgatgcctgcctcgccgaggaccctgacagcaaggtcgcttgtgagacctgcaccaagacaaacatggtcatggtctttggtgagatcaccaccaaggctaacgttgactatgagaagattgtcagggagacatgccgtaacatcggttttgtgtcagctgatgtcgggctcgatgctgaccactgcaaggtgcttgtgaacatcgagcagcagtcccctgacattgcacagggtgtgcac

SEQ ID NO: 42806 - DNA, 461 bp, Oryza sativa
  Clone ID: uC-osroM202025b04b1
cttgtcaccacacccacccacccaccaatggcgtcctcccgcctcctcctcctcgccgcgctgctcgccacggcggcggtgctggcggcgtcgcagaagccgaaggccgccacgccgacgaaggccacgccggcgtcgcccggccccgcggcggcggcggccgacggccccgcgccgacgaacgtgacggcagtgctggagaagtccggcaagtacaccaccttcctccggctcctccacgagagccgggtggacacccagatcaacagccagctgatggacagctacaacgggctgaccatgttcgcgcccacggacgccgcgttcgcggcgctcaagccgggcacgctcaactcgctgtcgtcgcaggaccagatccagctgatgctctactgcgtgctcccgcggttctacagccttggcatgctcaccacccttggcggacccgtgaacacgcaggc

SEQ ID NO: 42807 - DNA, 458 bp, Oryza sativa
  Clone ID: uC-osroM202025b05b1
ctcgatctccattcggtttttttttcctcgcttgctccgcctctctttcactcatgggcaagattaagatcggaaccaatgggttcggccgcatcggcaggctggtggtcagggtggcgctgcagagcgaggatgtccagctcgttgccgtcaacgatcccttcatcactcaccgagtacatgacatacatgttcaagtatgacaccgcccacggccagtggaagcatcatgaggtcaaggtcaaggactccaagaccctcatctttggcacgaaagaggttgcggtgtctggctgcaggaaccctgaggagatcccatgggcttgcggctggtgctgaatacgtcgttgagtctactggtgttttcaccgacaaggacatggctatatcttcacttgataggttctgccgagaatgtcgttatttttgcttccagtaaagactctcccatgttcgtt

SEQ ID NO: 42808 - DNA, 332 bp, Oryza sativa
  Clone ID: uC-osroM202025b09b1
tgttttcagagcccagctagctctcgatcatttgttacagagaaattgatcaaagcaggaaattaaccagctgtcaggaagcaatggctctcgtggaggataacactgccgtttcggtgagcttcagcgaggagcaggaggcgctggtgctcaagtcatgggcgatcttgaagaaggattccgtcaatattgccctccgcttcttcttgaagatcttcgaggtcgcgccgtctgcgagccagatgttcttgttcctgcgcaacttcgaagtgccgctcgagaagaacccctagcttaagaaccacagccatgtccgtctttgtcatgacatg

SEQ ID NO: 42809 - DNA, 398 bp, Oryza sativa
  Clone ID: uC-osroM202025b11b1
tcttgcggccgcctttttttttttttttttttttttttggacgggaaaccgaaattttactactcgttagcacgggaaacccaaccctaaacgaagctactggttgtagccgaagtaaccagaaaaaatcaaatcaagacacgaacttgatagatacagtaggacgatggcatgcgatgggttggtcgggaggtagagacttttattacgccttggtgggcagcaccggcacgacgaagtgctgtgcgacgatgcggcgctggatcttgccggtggccgtcttgggaagctcgtcggcgatgtacacctttttgggcaccttgaacgcggccagggtccttcgggagtagggcagcaccttctttttcccgagcgacacgcccttccgggggatcacc

SEQ ID NO: 42810 - DNA, 431 bp, Oryza sativa
  Clone ID: uC-osroM202025c03b1
agcgaatcagccactgcattttttgttcttgttctcttcctcctcccgaatccgatccatccattggccgccgccgcctgcgtcgtctcgtgcgttgcgtgttcgtgtccagagacgatggtcagcctcgtcgtcgagaagaccgtcaccgggtgggccgtctgggacgcctccggccaccttaccccctacaactacaccctcaggaagactgggcctgaagatgtggtggtgaaggtttcgcattgtggtatctgtcatactgacatccaccaggccaagaaccaccttggtgcttccaagtaccccatggtccctggccatgaggtggtctgtgaggtggtggaggtcgggccgtaggtgaccaagttcagttccggcgacgttctctgcttcttgcgtcatcttcggctgatgtccgcgagtgccat

SEQ ID NO: 42811 - DNA, 373 bp, Oryza sativa
  Clone ID: uC-osroM202025c04b1
ccttctcgttcgctcctctcctagtctcctccctcccatgcacgccgcccatggtggaggtggaaggcaaccagtaaccatcttgccaatctcgagttctcagcttgtggtcacaggtggagattggccacttcttgcctacctggtacgtgctaatgaccagctagctagaatggtacgaggctgagcgagtgagtggaagcttggttggtaggtaggagaaggctctcatggcgctggaagctgtggtgttcccgcaggagcacctgtcgtgcgctgccgccatgtacgcggcgccgacgtcgtcgctgggatgcggcgttgacatggacgagttctaggagaacggtggtgtggtgctgcaagaggaggc

SEQ ID NO: 42812 - DNA, 450 bp, Oryza sativa
  Clone ID: uC-osroM202025c05b1
aatttataaaaggcgcagcccgtcgtcgagccctctcatccctcttctttgtctgatcgatcgattgcttctccctcctctcgctactagactagagagtaggtagagctagctttctagctcgtggatcgttaagtttgtagtcctgcccgggcgccggcggtgaggtcgcgatggccggcggcgcggtggtgagcacgggggcaggcaaggactaccctggcaagctcaccctcttcgtcttcttcacatgcgtcgtcgccgccaccggtggtctcatcttcggatatgacatcggtatatcaggtggtgtgacgttcatggacccgttcctgaggaagatcttcccggaggtgtatcggaagaagcagatggcggacaagaacaaccagtactgcaagtacgacaaccagctgctgcagaccttcaccttgtcggtctacctcgccg

SEQ ID NO: 42813 - DNA, 507 bp, Oryza sativa
  Clone ID: uC-osroM202025c06b1
cgatctcatttaaagttcgagttgaacaagttctgcagtcacaaccaagcctgataatttcttacaaacttagcaataccttggaattctatggttacacaatatcagatctgttgggtggagacgctgcactgtgcaatacaatatggtcacttagagatgcaacgcagcagacattctttaatatccttaagagccgaggagaaaagttattgcgatatcctccacttgttgctgttgacctctctccccctccagcagtgagagaaggaatttcattgttgcttgaactcataaatacctacaatagcatgatggttcctgcctctggaaaaaggccaaatttcgatcctgtcatttctgccatactggatcctataattcagatgtgtgagcaagctgcagaggcacaaaagttaaaagggacaattgcacggcgtggtagaactagttttgatccactggaaaaatagagatcaatctaagttgatgcttttttatctaaga

SEQ ID NO: 42814 - DNA, 436 bp, Oryza sativa
  Clone ID: uC-osroM202025c09b1
gttttcagagcccagctagctctcgatcatttgttacagagaaattgatcaaagcaggaaattaaccagctgtcaggaagcaatggctctcgtggaggataacaatgccgtagcggtgagcttcagcgaggagcaggaggcgctggtgctcaagtcatgggcgatcttgaagaaggattccgccaatattgccctccgcttcttcttgaagatcttcgaggtcgcgccgtcggcgagccagatgttctcgttcctgcgcaactccgacgtgccgctcgagaagaaccccaagctcaagacccacgccatgtccgtcttcgtaatgacatgcgaggccgacgcgcagctgcggaaagccgggaaggtcaccgtgagagacaccaccctcaagaggctcggcgccacgcaccttaagtacggcgtttgagacgcccac

SEQ ID NO: 42815 - DNA, 514 bp, Oryza sativa
  Clone ID: uC-osroM202025c10b1
ttttctacaagtaatcacagatatatagggcagaaattaaggctacaaattaaaatgagcacaaagcttgttaagattggtccatggggtggaaatggaggaggttctgtagacatatctgtacccccaaatagcctgaagaacgtgacgatccgtagtggagcagccattgatgctattgcctttacatacgttggcacggacgggaatgaacatcttgcaggtccttggggtggtggtggtggaaatccaactacgattacacttggatctcaggaattcgtgaagggaatctccggaacatttaccaacgtcgtgacaaaccttcaaattgtcaccaatgtcaccacttataattttggacaaggtggtggaactgcttttagcctcccgctgcagagcggcagtgtggttggtttctttggtcgctcgggcgcacttgtggactttatcggagtttattgccacatatgatatatgtaatctacatatgaatatattcaaatggatatat

SEQ ID NO: 42816 - DNA, 431 bp, Oryza sativa
  Clone ID: uC-osroM202025c11b1
actcaccaccaccaccaccgtctccagccatggcctcctccgcctccctgcagcgcttcctccccccgtacccccacgcggcagcatcccgctgccgccctcccggcgtccgcgcccgccccgtgcagtcgtcgacggtgtccgcaccgtcctcctcgactccggcggcggacgaggccgtgtcggcggagcggctggagccgcgggtggagcagcgggagggccggtactgggtgctcaaggagaagtaccggacggggctgaacccgcaggagaaggtgaagctggggaaggagcccatgtcattgttcatggagggcggcatcaaggagctcgccaagatgcccatggaggagatcgaggccgacaagctctccaaggaggacattgacctgcggctcaagtggctcggccttttcaccgccgcagca

SEQ ID NO: 42817 - DNA, 471 bp, Oryza sativa
  Clone ID: uC-osroM202025d01b1
cttgtattcaaccatcaagcacatcaggaaggatggtcggtggcttcgacaaactgaaagtggagttcatcgaccaagatgagagtgtgcaggtcgttgcagacaccatcagaagctccggtgagattcctgaaaggtatgccaggcctgagatggaggccgatcctgtcatcatcgacaccgatggttacaatctgccggtaatagatatgtcaaggttgatcaatcctgagttctccgaggaggagattgccaagctcggatcagcctgtgaggattggggattcttccagcttgtgaaccatggggtggatggggagttgctgcaacggatcaaggatgacatcacagagtttttcagactttctctgcaggagaagatgtccgtggcgatcccacccaaaggcttgcaggggttcggtcaccacttcgtcttcttcaaggagcataagctggactgggtcgatttgc

SEQ ID NO: 42818 - DNA, 454 bp, Oryza sativa
  Clone ID: uC-osroM202025d02b1
acatatggatcggtggatctggcatggatctcaggagcaaggctaggactctctccggccctgtgactgatcccagcaagctgcccaagtggaactacgatggctccagcaccggccaggcccccggcgaggacagtgaggtcatcctgtacccacaggctatcttcaaggacccattcaggaagggaaacaacatccttgtcatgtgccattgctacacgccagccggagaaccgatccccaccaacaagaggcacaatgctgccaagatcttcagctcccctgaggttgcttctgaggagccctggtacggtattgagcaagagtacaccctcctccagaaggacatcaactggccccttggctggcctgttggtggcttacctggtcctaagggtccttactactgtggtatcggtgcttgacaagacttttgggcgtgatattgttgact

SEQ ID NO: 42819 - DNA, 426 bp, Oryza sativa
  Clone ID: uC-osroM202025d03b1
ccttctcgtccgctcctctcctagtctcctccctcccatgcacgccgcccatggtggaggtggaaggcaaccagtaaccatcttgccaatctcgagttctcagcttgtggtcacaggtggagattggccacttcttgcctacctggtacgtgctaatgaccagctagctagaatggtacgaggctgagcgagtgagtggaagcttggttggtaggtaggagaaggctctcatggcgctggaagctgtggtgttcccgcaggagcacctgtcgtgcgctgccgtcatgtacgcggcgccgccgtcgtcgctgggatgcggcgttgacatggacgagttcgaggagaacggtggtgtggtgctgcaagaggaggcccgagtggcggtgcacggcggcggcggcggtggccctggtgggatgatgagcc

SEQ ID NO: 42820 - DNA, 517 bp, Oryza sativa
  Clone ID: uC-osroM202025d04b1
cattgcgccgccacctctccccaaccctagctagctccccctccttccccggcggcgacatcgacgatggcggcggctgcggcaggcggcggcggcggcggcgccccgcgggcgctctcccagcgggagcaggacatccagatgatgctcgcggcggacgtccacctcggcaccaagaactgcgacttccagatggagcgctacgtctacaagcgccgatccgacggcattttcatcattaaccttggcaaaacctgggagaagcttcagctggctgccagagtgattgttgccattgagaacccacaggacatcatcgtgcagtctgctaggccttatggtcagagggctgtcctcaagtttgcacagtacaccggagctcatgccattgctggcaggcacactcctggtacatttaccaaccaactgcaaacctcattcagtgagccacgtcttctcatccttactgaccccaggacagatcatcagccaatcaaggagtctgctcttggaaaca

SEQ ID NO: 42821 - DNA, 483 bp, Oryza sativa
  Clone ID: uC-osroM202025d05b1
ggttttcctcgtcgtgcttgacggatggggcgaggccaacgccgacaagtacaactgcatccatgtcgcccagacgcccgtcatggattcgctcaagaatggttctcccgagaggtggagattagtgaaggctcatggaacagctgttggtcttcctagcgaagatgacatgggcaacagcgaagtgggtcacaatgctcttggtgctggtcgcatttttgctcagggtgctaagcttgtggaccttgctcttgcctctgggaaaatttatgatggagaggggttcaattacatcaaagaatgttttgacaagggtaccctgcaccttattggtttgttgagtgatggaggcgttcacttccgtcttgatcaagtgcagctgcttctgaaaggtgccagtgagaggggagcaaaaagaattcgtgttcacattcttactgatggacgcgatgttttggatggcagcagtgttggtttgtagag

SEQ ID NO: 42822 - DNA, 435 bp, Oryza sativa
  Clone ID: uC-osroM202025d06b1
gtatttaaaaaagaagggagaagagatcacagcagagcacgcacgtagcagcaacacagcaaagcaaaggcattcgatttcagagacgcatcttcgctttttgcctcggcgtcggtgctccacggcggcggcggcggcgggggcggcgccggagttccaccgcgcccgcctacatccgcgtgtgtgagagagagcggctacaaatggcctccgccgccgaggaggccaagggcgtggaggatggagatggaggggccagtgccaacaggggatacatcacacatatacgcttcacgatccgactacacagcggccgaggacacatccagtttccccgatgatgacaggggtctacgtagatcaagcgctatgtcatgtgggactgatagggttgtacacaccgaaggaaatgtctgcccgtctaaagaggagaga

SEQ ID NO: 42823 - DNA, 403 bp, Oryza sativa
  Clone ID: uC-osroM202025d08b1
tattttcaaacaacgcaaagcagtagcagcagcgagaagcaagcaagaagcgatggggatggggatgaggagggagagggacgcggaggcggagctgaacctgccgccggggttcaggttccaccccacggacgacgagctggtggagcactacctgtgcaggaaggcggcggggcagcgcctgccggtgccgatcatcgccgaggtggatctctacaagttcgacccgtgggatctgcccgagcgcgcgctgttcggcgccagggagtggtactttttcaccccgcgggatcgcaagtatcctaatgggttacgccccaaccgcgccgtcggcaacgggtactggaaggccaccggtgcccacaagcccgttccgccgtgggggcgcacgcttgggatcaag

SEQ ID NO: 42824 - DNA, 460 bp, Oryza sativa
  Clone ID: uC-osroM202025d09b1
cgccgatctccatctgtgtttgcagagcaggggaggggaagggaaggtatcctgaaagatgcttaatcttatcaaaataaaggataaaaagaaagagcaggcagcaagtgctgctggaaaggctcctgtgaagaagcaatctgctggagagctccgtcttcacaaagatattagtgagctaaacctacccaagagcacatcaatttcttttcccaatggcaaggatgatctgatgaattttgagatcatcgtccgacctgatgaaggatattacctaggtggcactttcgtctttacttttcaagtctctccctcttatcctcatgaacctccaaaggtgaagtgcaagaccaaggtataccatccaaatattgatttggaaggaaatgtatgcctgaacattttgcgtgaagattggaagcctgttctcaacatcaacactgttatttatggccttaac

SEQ ID NO: 42825 - DNA, 469 bp, Oryza sativa
  Clone ID: uC-osroM202025d10b1
cttgtacggacgcctagctaagctaagctaattaagctctaatttctcttttcttttttcttcgatctccggcgaaaaagtaagtacaatggccgaggtgaacggagccaataacggcaacggccaccacggccacggcaacggcagcggcgctgcggcggcggcggggcggtcgacgagtgtgtcgaggaagatcgagtcggagggggcggtgctgatgcccggggtgtacgacgcgctgtcggcggcgatcgtccagaagaccgggttctacgccggcttcatctccggctacgccgtctccggctccttcctcggcacccccgacgtcggcctcctcacgccgccggagatggcggaagtggcgaggcggatctgcgcgtcggcgcccaacacactcttcatcgccgacgccgacactggtggtggcaatgctctgaatgtgaagcgtactgttcaggacctgatg

SEQ ID NO: 42826 - DNA, 480 bp, Oryza sativa
  Clone ID: uC-osroM202025d12b1
ttttctctctctctcccgtttccagatcgccaaaaaaagattccgcgtagcggcgagaggggagggggcgcgcgtgcccagatctgcggggtctcgccggcggagatggcgtgcatcaagagcgcgcagagggcggcgctgacggcgctggcgccggaggcgccctacctcgccgccggcaccatgagcggcgccgtcgacatgctcttctccgcgtcggccaacatcgagatcttccgcctcgacttccagtccgactcgcccgacctccccctcctcgcctccgccccttcccccgaccgcttcaaccgcctctcctggtcccgccccggcgccgctgacggcgactccttctccctcggcctcctcgccggtggcctcagcgacggctccgtcgccgtgtggaatccgctgagcatgatcaacttccgggggaaagcggaggatgccttggttgccaggctcgagaagcacaccggg

SEQ ID NO: 42827 - DNA, 401 bp, Oryza sativa
  Clone ID: uC-osroM202025e02b1
gtgttttacagcctatggaacggttttgtgttcttggatttgatgaagtgagctattctggtgagactgcaacttcgggcacctgagacaagttctactaagactatgttttgcgtctttcgtggagatgatgaagaccagtctattcaggacacaggggacacaaggtggtagtcagatttttgtggagaaattgtgtagagttaagagaaaagagcagtttgttggcgcgctagtgcaggaggaatagtctttagggtgttattccttggcctgaggcccagaagcgtctttgttgcttttgtgtaaattacatacgcatgagaataattgtcctatcgtgtttagactttccattccgtattaaattgtgatttcgtttcccctaatgtgggctctgg

SEQ ID NO: 42828 - DNA, 398 bp, Oryza sativa
  Clone ID: uC-osroM202025e04b1
atttttagggggcggcctttttttttttttttttttcctgatcacctcattttatgggagcataacatttcattatccaacacatacacacgcacgataccctaatgttcaatgatatcatttacatgtttcatagtgcatgcacgatacatgaacattactatgtttattagggcacgcactaatagtagcttgggcatgaatccagtgtattggtcagtgactcaaagagaaaatggatcaaggtctggataattaccacctgttcttgaaagaacctgagccaggagaccaggctcattaccagccgtacattccgttttcttgttccagttcctgatccataccatgatgccataatagttgggcagtttgttgatgaactgtatcacggcgta

SEQ ID NO: 42829 - DNA, 293 bp, Oryza sativa
  Clone ID: uC-osroM202025e05b1
gtctttgtcgtcgccatctccgccgtcgctcgtcgggctctctccatctcccatccaggatgtagttcatttctgcctatctgatggcctatctggctggcaactccagccccactgcggaggatttgacaacgattctggagtcagctggttgtgaaatcgacaatgcaaagatggaactcctgttgtctcaagtgagtggcaaggacatcactgagctcatcgcttgtggcagggagaagtattgcttcatctcccatctggtggtggtggtgtaccttttgctgctgctg

SEQ ID NO: 42830 - DNA, 494 bp, Oryza sativa
  Clone ID: uC-osroM202025e09b1
ttttagatagatcgccgccgccgccgtcgtctccgcccctctccagccaccagatccagcgaccatggggcagggcaccccgggaggcatgggcaagcagggcggcgcccccggcgaccgcaagcctggcggcgacggcgacaagaaggaccgcaagttcgagccccccgccgccccctcccgcgtcggccgcaagcagtgcaagcagaagggccccgaggcggccgctcgtctccccaacgtcgcccctctctccaagtgccgcctccgcctcctcaagctcgagcgggtcaaggactacctcctcatggaggaggagttcgtcgccgcccaggagcgccttcgccccaccgaggacaagaccgaggaggaccgatccaaggtcgacgacctacgcggtacccccatgagcgtcggatccctccaggagatcattgacgagagccatgccatcgtctcctccttcgtcggccccgagtacttacgtcgcattc

SEQ ID NO: 42831 - DNA, 470 bp, Oryza sativa
  Clone ID: uC-osroM202025e10b1
tgaatcagagaagaagagcgagagaccgagggaggaggaggagagagaaggcgaggcgcaaagcgcaaatggagctctgcgtccgcgcctcctcgcttctgctcggcctcctgctccagctcctttcctcagtggacgtggtgtcggcggcgcagaaatttggtatcaactatggccagatcgccaacaacctgccggacccgacgcaggtggccggcctcctccagtcgctgaacgtgaacaaggtgaagctctacgacgcggaccccaaggtgctgatggcattcgccaacaccggcgtcgagttcatcatcgccatcgggaacgagaacctgcagtccatggccggcaaccccggcgccgccaggcagtgggtgacgcagcacgtgcagccctttctaccggccacgcgaatcacctgcattaccgtcggcaacgaggtgttctccggcaacgacacccgcatgatg

SEQ ID NO: 42832 - DNA, 459 bp, Oryza sativa
  Clone ID: uC-osroM202025e12b1
tgttttctcttccaggatccaaaccctagaattcttctctgcgttcctttccccaaatcaccgaaccctaatcccgcttctttcaccccaccaaccccatgccactgtttcgtacatacagccggcgccgtcgccgtcgtcgtgacagccgtctcagtcctactcgctcgcgcgcaccatatcaggaggaggaacatgtggttgagactgcatctgcaaaagcgcgcgccgatccgctgtatgcaaaggaggggcatgtgccatcttacatcgctgcttcttcctcatcctgtcagcaagcagatgcagtagctcaggacaccgaggtcttgccaccatcaggaagctgccttttcttatctctggcatcacacgtttgggcccgacatgtgaaagattggtgactcatatttacatcatggttgatctttacggattctttcacacatttcctgatgt

SEQ ID NO: 42833 - DNA, 523 bp, Oryza sativa
  Clone ID: uC-osroM202025f07b1
ctttcacacatcccttttccctttctccgcgtcggcgcgtccaaatcctcccgctcctcctccccttgaactcctcgccggagcaacggatccaccggctctgacgccgacaaacgcgggtcagctagatccagcgccacctgctccatactcccccgaatattccacttacgagccctgccgccacgtctggaggtcatgttccccacttcggtgctgccgccgtacttgcggctctccccctcttcctgctgctccagctctagccctccctccgcaacatcctctcctttgccctactcgccggagcaatggggataccagactgccggcgatgagtccggggcagccagatccagcgccacctcacccatggcagttgcttcggcgcgacgatggccaggggccgcgctgccctccttaggttaatacagacgttaggtgaagaaagaccccgggcagacttacggcaagctacccttccatgaagattgaggcttgttcaagagtcattgaatgtttg

SEQ ID NO: 42834 - DNA, 446 bp, Oryza sativa
  Clone ID: uC-osroM202025f08b1
ctcagttcttgaatccattcggggtgtaaaaatcatttacagaactaaagaattgaaagagaaacaggacagaagtcgcatttggaatgagacttggctggcaggtttcttttacaaaccgtgcaattatgaactatttgtcaaacagtcgctgaacatggaaatggctatcattatggcaagggatgctggcatggactggatcattcatcttgataccgatgagctaattcatccagctggtgcccgggagtactctctgaggcgattgcttttagatgttcctgataatgttgacatggttatcttccccaactatgagagcagcattgagcgagatgacatcaaagatcctttcacagaggtttccatgtttaagaaaaaatatgatcatctttcaaaggatacatattttggcctatacaaagaagcaacgcgtggtaatt

SEQ ID NO: 42835 - DNA, 484 bp, Oryza sativa
  Clone ID: uC-osroM202025f09b1
cctcaccccaatcctcccccgatctccccaatccgagagctccggaggagcagcgcggaggcggagatggcgctgcggcgagcgctgctcagatctgccgagatctcccccgatcgcaaggctgcacttgagtacctccattatctatcgagagcacagcctactcgttctctaacaggtgctggcctttattctgctggcaaatcattcagcactcaggctgctactacatcaagcacaccacaaccttcaccaccacctccacctccggagaagactcactttggtgacctcaaagatgaggaccgcatttttaccaacctctatggtcagcatgaccctttcctgaaaggtgcaatgaagaggggtgactggcatagaaccaaggatttggtgcttaaaggggcagactggatagtgaatgaaatgaaaaaatcgggacttcgagggcgtggaggtgcaggaatcccttctgggcttaaat

SEQ ID NO: 42836 - DNA, 473 bp, Oryza sativa
  Clone ID: uC-osroM202025f10b1
tttttcgtgttcgcgttcgtcgcgcggctccgacctccaaagccgccgctacccttcccgtcttcgtcgtcgccgcgcacgcagatcgcgaaccagcccgcgcgccgcgcagcagcgccgcggagaggaaaggagagctccgtcgtgcaccccccgccaccatctcgtagggagagatggggctcacgttcacgaagctgttcagccgcctcttcgcgaagaaagagatgaggattctcatggtcgggctcgatgcagccggttagaccaccatcctttacaagctcaagcttggcgagatcgtcacgaccatccccaccatcggatttaacgttgaaaccgtggaatacaagaacattagcttcactgtttgggatgtccgtggccaggacaagaacaggcccctgtggaggcacttttttcagaacacacagggactcatctttgtgcggacagcaatgatagggggcgtg

SEQ ID NO: 42837 - DNA, 242 bp, Oryza sativa
  Clone ID: uC-osroM202025f11b1
ccattgctcccttcctccctgcctttttcttccataagtagtagtagtagcgggagtggccgccgccgcagccatagatctgcggcgccgcgtatctcgcggctggtttggctggtgcggttagcggctagggttttggttgtttcgtctgatcgatcctccccgattttgcggcggcggtggtgaattggtgtgtgatctgatatggctggcggcggcggtggcgggggaaggggggaggg

SEQ ID NO: 42838 - DNA, 400 bp, Oryza sativa
  Clone ID: uC-osroM202025f12b1
ttctcacctcgcgcactcagtctgtactacctgtacgtacgtggccgccgctagctaagctaggaattgaaatggggatggagaggccgcaagagaaggtggccaccaccaccaccgccgccttcaacctcgccgagtccggctacgccgaccgccccgacctcgacgacgacggccgcgagaagcgcacagggacgctggtgacggcgagcgcgcacataataacggcggtgatcggctccggcgtgctgtcgctggcgtgggcgatagcgcagctggggtgggtgatcgggccggccgtgctggtggcgttctcggtcataacctggttctgctccagcctcctcgccgactgctaccgatctcccgaccccgtccatggcaagcgcaactacaccta

SEQ ID NO: 42839 - DNA, 353 bp, Oryza sativa
  Clone ID: uC-osroM202025g02b1
aaagctgcttcacattttttttttttttgatcgaattggtctctcgcttgcatttcactccatggatagacgtgcatgaggtttagtgtggtgattagttcttggatcttgaatcggcagctgatcaaatccgcgccgaaaggcggtggtcggcagcaacgcctggcgaaggggatggagaaggtcgcggttggcttgttgcccccgctgcggttcatcgccgtcctcgcccgcgtgtcgtggacgtcgttcatctactgccatttctccttgctcagcggcggactgctgctgggccactgcggccgccacaactgatccgacccgtgccgggtgaggtacatctacgtgca

SEQ ID NO: 42840 - DNA, 461 bp, Oryza sativa
  Clone ID: uC-osroM202025g04b1
atcttttgttgtctcgtgacgacggagactccatccgacccacttgtattggacgactcctctcgctccccgaggcggacgcggaccgcttcacccggccaatcaaaacgcggcatccatccccgcgtccgagctcgcgtaggctgcggctgctgcatccatggccgtcgcgaggctggtggccgctcgggcccttctcctctcccccgccgcggtggcggaggcacaccgatcgcccccggcgctgctgcggttggcgttcgcgccgatcccggcgcggtggctggccgtccccttgcgcgtggcggtgggtgagccggagccagaggaggatgcgcggagggcggcggcagagcgcgcggtgcggaagcaagcggagcggcggacgtacctggtggcagcggtgatgtgcagactagggatcacgtccatggtcgtccgcgtcgtatactaccggttcc

SEQ ID NO: 42841 - DNA, 463 bp, Oryza sativa
  Clone ID: uC-osroM202025g05b1
gttattcatatacacaggatccagcgacgagtatgtctacatctatgacgtggtaactggggatatcgtcgagaagctttcgtggcatggatcgatcatcagggactgtacctggcatccttacaacctgacaatcgtcagctcttcctgggacggctacctggcaaggtgggaggcatcaggggacgaggacgacctttctgtgctcacggaaaacgaacagaggacgagtccttaccgtcagtcgtacacactgcaccttctgctgtagggaagagaagtcattttggtttcctgtaaggagttgtgatgttgctacatctgtaatcgcctgattgcaatgctcattgcaacagtgtataggactgggtgctgtcaaactgcatttattgctgtagagaggccattggtcgcctgcaaagagttatatttgtgctcttctgattgcaacagagtatatagg

SEQ ID NO: 42842 - DNA, 471 bp, Oryza sativa
  Clone ID: uC-osroM202025g06b1
ctcgtttggatcagctaccggctttccgttgatatctccgcgcttgatggccgccgccgccgcggtcgcctccctcctcggcttcgtcctcgctctccctttctgcttggcggcgccgtccatcacaacgcatggcagcgacggcggcggcggcagctacgtgtcggcggtcggggaccccggcatgcggcgcgacggcctccacgtcgcctgggaggcatggaacttctgtaacgaggtcggccaggaggcccccggcatgggcagcccccgcggcgccgactgcttcgacctcgagaatggcgtggacgagaacggccagccgacgtacaaggtggtgcaccgggtgaccgacgccgacaacaacctacgcgccggcgacccttttccgggctcgccggcgaacatcacggacgtcgacctgtacgcggcggtgaaggagctctacctgggcgaccggtgccaggtgcc

SEQ ID NO: 42843 - DNA, 217 bp, Oryza sativa
  Clone ID: uC-osroM202025g09b1
cttctcccccccccccctcattttctctctcctctttctctctctctcttcctcccaatctgcgaagcgagagagagagagagagagctcgaggcgagctctccccgcccttctcccaaaccctaatccttccgccgcgcggaggagagccgcgtctcgggcgcgcgcgtggaggcgtgaagcgatctgtattggtggaggggaggggaggggatgg

SEQ ID NO: 42844 - DNA, 442 bp, Oryza sativa
  Clone ID: uC-osroM202025h03b1
attttgttcgatgctcagctcatgccctacctcagccactgtggattagccaggctaagccaatttgtcagtgccataagaacggactcagaagctctcaacagtggtaaaggctatgttgcacctgagcttactgacccagcaacagatagcatcaaggctgacatttacagtttcggtgtgattttgctcgggcttttgactgggcagaaagcctttgacagttcaagaaggcagaatgagcagtttctaggtgattgggcatctcctcatcttcataaccttgattctttggaaagaataacctgatccaagaatacatgcatttattgcacccttaagctttctttacgttagggaaacataatcttactttgcatcaagaaataaccagagcttcgtccgccaatgacagtcataacaagacaaactactgaagctt

SEQ ID NO: 42845 - DNA, 123 bp, Oryza sativa
  Clone ID: uC-osroM202025h05b1
gtttttgtcttcttcctcctccacctccacttgatcccagcatccgcatccgcagctgcagcagcagcggcgaggtggaggtagctagatccgtgggaggtggtggttgtggtggtgaggggg

SEQ ID NO: 42846 - DNA, 484 bp, Oryza sativa
  Clone ID: uC-osroM202025h06b1
gtttgattcgtgttcgcttctccgactcgactcgatcgactcctccctcctcgccgtggtgcggcggcggcggcggcgaagcgcattggtggtccactccggcggcggggggagtgagaagtcaccagtaaggaggagtagaggatggcggcgagcggaggcagctgcccggcggcgatgaaggcgacgtcgcagggggcgttccagaaggagaacccgctggacttcgcgctgccgctcatcatcctccagatctgcctcgtcgtcgtcgtcacccgcgtcctcgcctacctcctccgccccctccgccagccccgcgtcatcgccgagatcatcggtggtatccttcttgggccgtcagcgctgggccggagcagcaagttcttgcacaacgtgttcccgccaaagagcatgaccgttctggacacgctggccaacctcggccttctcttcttcctcttcctcgtcggcctcgagctcgaca

SEQ ID NO: 42847 - DNA, 514 bp, Oryza sativa
  unsure (1)..(514): unsure at all n locations
  Clone ID: uC-osroM202025h09b1
tcagtatcgaatcctcttttctcctcgtgcccaccaccaccaccgtagcaatggcgggcaacgggccgatcaacaaggaggacccgctcaactggggcgcggcggcggccgagatggccggcagccacctcgacgaggtgaagcgcatggtggcgcagttccgcgagccgctggtcaagatccagggcgccaccctccgcgtcggccaggtggccgccgtcgcccaggccaaggacgccgccggcgtcgccgtcgagctcgacgaggaggcccgcccccgcgttaaggccagcagcgagtggatccttaactgcattcgccacggcggcgacatatacggtgtaaaaaacggctacggcggaaccttccacccgccgaccaaggacggccccgntcttcaagtggagcttctcaggcattttaacgcccgaatctttggcactggctccgatggccacacgctgccgtcggagaccgtgcgggcgggcatgctcgtgcgcataacaactttttt

SEQ ID NO: 42848 - DNA, 503 bp, Oryza sativa
  unsure (1)..(503): unsure at all n locations
  Clone ID: uC-osroM202025h12b1
gtatttcctgacgctgtttacttagttgatgctattgagggtgggaaagaacttattgaagcttgcaaaccagcacttgaatcagaatatgtcaccaaagttattcatgactgcaaaagggacagtgaggctctgtatttccagtttggcataaaattgcataatgtgatggatacacagatcgcttattctctgttagaggagcaggaagggaaaaagagaggatacgatgagtacatatcttttgtcagcctccttgctgatccccgatattgtggaatggcatatcctgaaaaggaagaagtccgtacccttctaaggcaggaccctaacttttggacgcataggcctttatctgaaatgatgattcgagcagccacagatgatgtccgcttccttctcagtatacatgagaaaatgatggagaagttaagcaaagtatctttatggcgtctgtcagttcgcagtgagctatactgcangtgcttttgataaatgacaac

SEQ ID NO: 42849 - DNA, 126 bp, Oryza sativa
  Clone ID: uC-osroM202026a01b1
ctactaatccgcctcctcccccaacgcatcgccggagcccatccatccagatgcctcccttctcctcctactccacttgctccacccccgatgccgcccagatgcgatgcccccccggcgcgatcg

SEQ ID NO: 42850 - DNA, 400 bp, Oryza sativa
  Clone ID: uC-osroM202026a05b1
cttttatttgatcctctcctctcctccatcgccgggcgggacacccgccgtccgcctgcgaccccctcctgctcggcgtcagcattcttgggcgggtttcggtttcttggggtcgtcgtcgtagcggccaccgagaggggatcaagaagctgaggatcgcggtggggcaacgaggattggaggcgcgtctgccctgatcacggcgcattttatgggtgaagaggcttcggagttttctgtcgagagcgtctccttggaatccaaggactgtctgcagaatgccatagatataggcaataagacgtatgttattaacagatcagatgaccccaagttattgattaccatcaaaattttggacaaactaactcagacttggggtgtccctacagcactttgg

SEQ ID NO: 42851 - DNA, 272 bp, Oryza sativa
  Clone ID: uC-osroM202026a06b1
atctgtttttagggtttcgcggatcaaggcggcgggggcggttagggtttcgaggcgggccacatggcctcaccggcgggggagggggacgcggcgagcgcgtggtctgcggagctggagcgtgcacagcacgctgctggcgagctgcacgaggctgtacaagcagatggaggagcacttctggtagctggagcgcgagctggcggcgaggttggactcgctgcctcacaagcaccgcgcggaggaggcgcgggctctcgccgccatggact

SEQ ID NO: 42852 - DNA, 475 bp, Oryza sativa
  Clone ID: uC-osroM202026a08b1
tgtttacctccccacgccggccaccgccgcacggggtccggcgacgaacgagggcgctgctctcgagcgcgatggggggccggaagcgcgcgctgctggtgggcatcaactacccgggcaccaaggcggagctcaaggggtgccacaacgacgtggcccgcatgcgccgcgccctcgtcgaccgcttcggcttcgacgaggccgacattcgcgtcctcgtcgacgccgaccgggcggcgccgcagcccacgggggccaacaatccgccgggagctcgcgcgcctcgtcggcgacgcccgccccggggacttcctcttttttcactacagcggccacgggacgcggctgccggcggagaccgggcaggacgactacacccgctacgacgagtgcattgggccctccgaaagaaccttatcacagacccagatttcacagaactcgttcaaaagtcccagatgactgcttattcacc

SEQ ID NO: 42853 - DNA, 466 bp, Oryza sativa
  Clone ID: uC-osroM202026a11b1
tttgttggtgacccgttcgacgcagtgggagcggaggtgagcaaagctccggccgcgacctccagcaagacgacgatggagccaagccgcccgcgcctccctctcctcctcctcctcctcctccacttctcgctgctcgcctcgccgtgttccgcgcggtggcgagacggctgcggcgttggcgatctgcgcgagagcttcctccggtgcgtcgcgcggcggtcgccggcgaccgccggcgacccgtcgcggctcgtgcacgcgccgggcgacgcctcctacccgtcgctgctcgacttcaccatccagaacctccggttcgccttgccgtggacgccccgcccggcgctggtgctcacgcccgtgaccgccgacgaggtgcgcgcctgcgtcgtctgctgccgcgcccaccgcctcaccgtccgcgcgcgcaacggtgggcacgactaccagggcctcttgtacc

SEQ ID NO: 42854 - DNA, 453 bp, Oryza sativa
  Clone ID: uC-osroM202026b02b1
gtggtatatggtgagtagcccggattacccggagtcggagttcaggaaggcgttccgcatgtccaaggccacgttcgaggtggtctgcgacgagctcgccgccgccgttgccaaggaggacaccatgctccgcgccgacatcccggtgcgcaagcgcgtcgccgtctgcgtctggcgcctcgccacgggggagcccctgaggctggtgtccaagcgcttcgggctagggatctccacctgccacaagctcgtgcttgaggtctgcgccgcgctcaaggccatggtgatgcccaaggtggtgcgcttgcccgaggccggcgacgcggcaaccatcgtcgcgcacttcgaagccatctccgggatctccggcgtcgtcggcgcgatctacaccacccacatcctcagtatcgtgcccaaggtcaacgttgtctcctactacaaccgccgtcacac

SEQ ID NO: 42855 - DNA, 328 bp, Oryza sativa
  Clone ID: uC-osroM202026b04b1
cttttatcccctcttcgcctcgcggggcgggggccggaggaggaggaggagggcggcctgacgctacggcgtacgggcggaggaggacggagagggaggggccgacggctcgccgccgtcatggagaaggttagtcatctgatgaacggtggctgcggcggcgtggggaagaggaggggcctttcggcggcgggggtggggctagggctgtagaagcagaattcgtggtcgtcggacatggagagggacgaggcgttggagtggcagcgcggtatgaacaagggatcgttgtcgttgtcggttctgtcgcaggtgaggagcgttacgg

SEQ ID NO: 42856 - DNA, 529 bp, Oryza sativa
  Clone ID: uC-osroM202026b08b1
tgtaaatagcaattcaattcccaatccccccgggccgaagtgaaggaagcggatcatggagctcgccatggattttgcgctccgtctccgcgacgccgccaaccaccaccttttccgcttcgagcctttcgtgctcctcggcgcgcccctcttcgccctccttgctgcccgaaccctccacgccgccgctgccgccgtcgccgaccgcggactccgcaccgtcctcctcgctctacccatgacagtcatcaagttgcttccgggagttagcgcctacatcaacgctgagaagaggaaggttgttgacccgctgcactcaggaggcacgttcacaaaaagtactctgtggaccgagttgccaattgttgggctttccaaccaagtgattaacgatcctcgaaacacttgaagcttgagatgtaaactggtagggaaaatgctcttggacagctcatattgttgggagtgaatccgacagttattttgcattgataaacaaggcttactctatgtttttacacaccaacct

SEQ ID NO: 42857 - DNA, 133 bp, Oryza sativa
  Clone ID: uC-osroM202026c01b1
cttcatcccctcctcctcctctccccgccgacgacggggccgagctacatctccgccgtgctgatcgcgtggagccgaggagaggagcggcggccaacgctacgaggagaggagagtgggggaggggagggga

SEQ ID NO: 42858 - DNA, 497 bp, Oryza sativa
  Clone ID: uC-osroM202026c11b1
ccttccccgtctccttcctccattcctccgccggtagaaccttctagaagctctcctcctcctcccatggcggcgacgatcgtgtccgtcaaggcgcgccagatcttcgacagcaggggcaaccccaccgtcgaggtcgatgtgtgctgctcagatggaacctttgcaagggctgcagatcccagtggtgcatcaactggtgtctatgaagctctcgaattgagggacggtggatctgattacttgggaaagggtgtttccaaggctgacgacaatgtgaactcggctattgccccagctctgattggcaaggaccctacgtcacaggctgagcttgataacttcatggttcagcagcttgatggaaccaaaaatgagtgggggtggtgcaagcagaagctcggtgctaatgcaaacctggctgtgtcactggccatttgcaaagctggagctatcatcaagaagatttctcttgaccaacacattgccaaccttgc

SEQ ID NO: 42859 - DNA, 608 bp, Oryza sativa
  Clone ID: uC-osroM202026d01b1
cggcatacccgggcgagcggcacgccgtcggttttttttagtggagaggaacaggaaaactacagaggacttgcttataggatccacgaacacgggcgaggaaggcctagcatgcaatgcaacaagatgggcatgcctctgctgctgctgctgctgatcctcgtcgctgctggcccccaggcaggcagagctgcaaagccaatcccaaatctccagctcatgaccaaggagggcggcagttcaagaatcatccaggacgacatcataaaggcaatcaacaagcatcccaatgctggctggacggctgcacggaatccatactttgcaaactatactactgcgcaattcaaacatatccttggagtgaagccaacaccgcatagtgtgctaaatgatgtccctgtcaaaacttatccaagatcgctgatgcttccaaaggagtttgatgccaggtctgcatggtcacagtgtaacacaattgggaccatacttgatcagggtcactgaggctcgtgttgggcatttggtgctgtggagtgtcttcaggatcgtttctgcattcatttaacatgaacatttgcatattgtcaatgacctagtggcatgct

SEQ ID NO: 42860 - DNA, 483 bp, Oryza sativa
  Clone ID: uC-osroM202026d02b1
gtctgtacctctccccaaccctagctagctccccctccttccccggcggcgacatcgacgatggcggcggctgcggcaggcggcggcggcggcggcgccccgcgggcgctctcccagcgggagcaggacatccagatgatgctcgcggcggacgaccacctcggcaccaagaactgcgacttccagatggagcgctacgtctacaagcgtcgatccgacggcattttcatcattaaccttggcaaaacctgggagaagcttcagctggctgccagagtgattgctgccattgagaacccacaggacatcaccgtgcagtctgctaggccttatggtcagagggctgtcctcaagcttgcacagaacaccggagctcatgccattgctggcaggcacactcctggtacaattaccaaccactggaaacctcattcagtgagccacgtcttctcatccttacctgccccaggacagatcattagc

SEQ ID NO: 42861 - DNA, 484 bp, Oryza sativa
  Clone ID: uC-osroM202026d05b1
ggttctgatgcgcgtgctcgtcaccggcgccgcaggacaaattggatatgctcttgtccccatgattgctaggggtgtgatgttgggtgctgaccagcctgttattctacacatgcttgacattccaccagctactgaatctcttaatggccttaagatggagctggttgatgctgcatttcctcttttgaagggaattgtcgcaacaactgatgttgtggaggcctgcactggtgtgaatgttgcggctatggttggtgggttccccaggaaggagggaatggaaaggaaggatgttatgtcaaaaaatgtcttcatctacaaatcccaagcttctgctcttgaggctcatgcagtccctaactgcaaggttctggtagttgccaatgcagcaaacaccaacgctctcatcttaaaagaattcgctccatccatccctgagaagaacattacttgcctcacccgtcttgaccacaacagggca

SEQ ID NO: 42862 - DNA, 485 bp, Oryza sativa
  unsure (1)..(485): unsure at all n locations
  Clone ID: uC-osroM202026e01b1
tatgactgacctaaccattatccaattgaatctagcataaccggagaagtggcaaacattgctattgctatcaacaaaaagccattgcctttattaggttcctgccatgtgtgaactccggaagccaggatcggctagtcatttgttcttacactagatttggatatcaccagtattacttcgaaacaagcacgtcttatacagatcagactaccagttttgttctgcttctgctgcaagaacgccatcgacaacatcaacggcgtagccagaaacctgaatggcccggcactcatcggctccggaaagctcgccttcggcgccaccaaggtcgaccgctacaacagcgtcaacctccccgtcgacaacaacaacaacaacaagttctacggcggcgccgccaagatcaacaacaacaacgtcaacgccttcgggatcaacaagatggggngttacaacaacaacagcaacggcggcggcaacta

SEQ ID NO: 42863 - DNA, 453 bp, Oryza sativa
  Clone ID: uC-osroM202026e02b1
cttatatcgcatcgattttctccttttcgagtttttttccccttcgcttgagagctttcgacgagagcgagggagagggagatcatggccggcaagggagacgggccggcgatcggcatcgacctcgggacgacctactcgtgcgtcggcgtgtggcagcacgaccgcgtcgagatcatcgccaacgaccaggggaaccgcaccacgccgtcgtatgtcgcgttcaccgactccgagaggctcatcggcgacgccgccaagaaccaggtcgccatgaaccccatcaacaccgtcttcgatgcgaagcgtctcatcggccggcgtttctctgacacgtcggtgcagagcgacgcgaagctgtggccgttcaaggtgctacccggccccggcgacaagccgatgatcggcgtgcagtacaagggagaggagaagcagttcttcgctcaggagatc

SEQ ID NO: 42864 - DNA, 501 bp, Oryza sativa
  Clone ID: uC-osroM202026e03b1
gcttttgtgagataacgcagctggcctcgctgggccgggctgatatagcgttcgcagctatctgctccacggctatgcgacagcggcggtgcgcgtttcttgacttgttcatctctagttgcacttctcaccatgaagaatctactttcgtggctcttcttgcacgatgtctcgatgcccaccaaactataggtgagccgaccatggacatagagaccgacggtcgcttcggcaacaagcgcgtgcaccaccgcctcggcccggccaacggcgccgcctcctcgtccacctccgggaaggtctgcatccactggcgcgccggccgatgcaatcgcttcccctgcccttacctccacagcgagctccccgaggcgacagccaagcgcccgagccaaagcggcggcggcggcaacgtctggaggaatccccactcaggaggtggagggggccgcggcgcccgcggccccggggcccgaacaatgggggaggggccctgttgtg

SEQ ID NO: 42865 - DNA, 122 bp, Oryza sativa
  Clone ID: uC-osroM202026e04b1
caagtacgcgagcggccgccctattaaattatttgtggtgatattaaatttttatttgggcgacacaccacacacggccacaaacacaaccaccaatacaaaaaagcaaacaacaaccaacc

SEQ ID NO: 42866 - DNA, 513 bp, Oryza sativa
  Clone ID: uC-osroM202026e05b1
acatcatacagcaaccagccagctgccacactagcttgaggcgagcgagcgaagcttagctagcggatataacaagtcgtcgatctgcttgctgcttttgtgaattgcggtggaagcatgtcgagcgcgtcgtccatggaagcgctccacgccgcggtgctcaaggaggagcagcagcagcacgaggtggaggaggcgacggtcgtgacgagcagcagcgccacgagcggggaggagggcggacacctgccgcaggggtgggcgaagcggaagcggtcgcgccgccagcgatcggaggaggagaacctcgcgctctgcctcctcatgctcgcccgcggcggccaccaccgcgtccaggcgccgcctccgctctcggcttcggcgcccccgccggcaggtgcggagttcaagtgctccgtctgcggcaagtccttcagctcctaccaggcgctcggcggccacaagacgagccaccgggtcaagctgccgactccgcccgcagctcccgttttg

SEQ ID NO: 42867 - DNA, 484 bp, Oryza sativa
  Clone ID: uC-osroM202026e09b1
ttgcacgctgtaggtctttagagtggagaggaagaggaatcctcctcagtcctcaccttcagatttcagaacacaggcaatcggccctagctgcaatccaacaagatgggcatgcctctgctgctgctgctgctgatcctcgtcgctgctggcccccaggcaggcagagctgcaaagccaatcccaaatctccagctcatgaccaaggagggcggcagttcaagaatcatccaggacgacatcataaaggcaatcaacaagcatcccaatgctggctggacggctgcacggaatccatactttgcaaactatactactgcgcaattcaaacatatccttggagtgaagccaacaccgcatagtgtgctaaatgatgtccctgtcaaaacttatccaagatcgctgatgcttccaaaggagtttgatgccaggtctgcatggtcacagtgtaacacaattgggaccatacttgatcagggtcact

SEQ ID NO: 42868 - DNA, 99 bp, Oryza sativa
  Clone ID: uC-osroM202026e10b1
atcaccgttcgtccgctcgccgcgtcgacgagctcctcctccgcttcgcgcttcgtgtcagggtttggagtggagtggagggggaaggaaaagggggag

SEQ ID NO: 42869 - DNA, 353 bp, Oryza sativa
  Clone ID: uC-osroM202026f01b1
gttgatttcagagcccagctagctctcgatcattggttacagagaaattgatcaaagcaggaaattaaccagctgtcaggaagcaatggctctcgtggaggataacaatgccgtagcggtgagctttatcgaggagcaggaggcgccggtgctcatggatctggagctgaatcgaagcaaggatcggaacctgttactgctgcctaaggacaggacactcacgacatatcttagattttgtgtgctggctaatctttgttctagtggtgcactgatgagaaacgttacttcccaagttgtcgggcgatgatgattcttgttgagattttcaaattgcaatccatatttgaacc

SEQ ID NO: 42870 - DNA, 352 bp, Oryza sativa
  Clone ID: uC-osroM202026f02b1
ttctttttctgctcctcccctctccgccgcctcgcgctcaagccctcctcctcccgcgccgccgccgccgccgccatgtcgtccgcccccgccaccgccatcgccgcgccggtcgagcacatcgtgctcatcaaggtccgccccgaggcggcggcgtcgggcgccgccgcggcgatggcgtcctcgctgcaggcgctgtccagcgtggtgcccgggctgtcgtacattcacgtgggccccgcgctccggctgaggtcgccgggaggtgcggccctggggggaggacatgttcgccactcgcgctacgccaccaagcccgacctggcggcttacgcagcgcaccgggcgcacg

SEQ ID NO: 42871 - DNA, 434 bp, Oryza sativa
  Clone ID: uC-osroM202026f04b1
ctttattgacccggccggaatctcttcctgctgctcggaatagatcgcgaaatactaaccaacagcatctaccctttattgttactaatcaaatctctaacccgcctgaacctcctggaggaaaagaagtcattaccttcaatggttctcgtaatatctttatacataagataatggaagtctcaacaagctcagagtcatcatctggatctaattctttgtcatcatcaccaaagaacaatatttttcctttatatggaccaatgctcaaatcctcacctcttatccctacagatatgatgaggataacagaaatcaagagtatatgaaaacctcttgatcctgacgagatcatccaaaaattatcttaacaacaaaaatttcaactctgaataatcgcaactattatttttataataataagcgaatgaagg

SEQ ID NO: 42872 - DNA, 559 bp, Oryza sativa
  Clone ID: uC-osroM202026f06b1
gtcgcgctggtccaattgatcagaatcgaatgtagagtacctgagtacggatggacgacacagaaggtgttccatttcatgaactttattgtgaatggagtgcggtcaatcgtgtttgtgctccgacgagatgtgcaacttgtgcagcctgaggtatttcaacatgtgctcattgattttccggggcttgcattcttcacaacctatgctctgttagtgctcttctgggctgagatttactatcaggcacgggcaatgtctactgatgggctcagaccagctttttatacaatcaatggagtggtctatgcaatccagataatactttggatggcgttgtggtggaaaccagttcgagcaatggtcatcttgtctaagatgttctttgcagcgacatctttatttgctgcccttggatttcttctttatggagggaggctatttctgatgttacagcgttttccagttgaattaaaaggaaggcgtaaaaagttgaatgaggttggatatgtgacaatcatatgcttttctggcttcttgatcagatgcgtaatgatgt

SEQ ID NO: 42873 - DNA, 372 bp, Oryza sativa
  Clone ID: uC-osroM202026f07b1
tctatctgaacacagcaccaccccttctgctgcatctcccacctccctctgaattgtgggcctgaggcgatggcggcgctcgccccgtccaagatgctcggcacccggctcaacttcgccggctcctcccgctacgccaccgcggcaccgaccaccggagcgcagaagatcgactccctcttcagcaagaaggccgtcctgtagcccaagcccaccgtcgagacctcctcgagccccggcatcagggattagctcgtgaagaagttcgagccttccaggaagatgaacctgccggagggtatcctggacctgtcagaggtgccggactactctcacggcgagggccccggagactacggctacgaccctttt

SEQ ID NO: 42874 - DNA, 559 bp, Oryza sativa
  Clone ID: uC-osroM202026f10b1
tgtctgagtcgagtcgcctcccccaccgccggccaaccatgctgccgccggccgcccgcctcgcggcccgccgcctcctagggctcgcgacctcctccgcctcggaatcggccgcggcgcgacgcttgacccgttctccgatctcctacgccgccgcgggctgctcctccaggctgatctccacggcgcttaactaccacctcgattcgccggaaaacaaccccgacatgccgtgggagttcacggaggccaacatgaagaaggttaatgagatattgtctcactatccaagcaactacaagcagtctggcattattccaatgcttgatcttgcccagcagcagcatggtggatgggtgccagttgcagcaatgaatgctattgctaagatcgttgaagttgcaccaatcagagtatatgaagttgctacattttacacaatgtttaaccggactaaggtgggtaaatatcaccttctggtgtgtggaaccacaccttgcatgaatcgtggtcacgtgaaattgaagaagccttgctagaacattttggagttaaaacg

SEQ ID NO: 42875 - DNA, 538 bp, Oryza sativa
  Clone ID: uC-osroM202026f11b1
ctttcctccaacctccttcccacttctcaacctcgcctcgccatctccgcgccgcggcccagatccctccggcgagcgccgccgccgccaccgcctccgccatggaccgcctccgcgcggggagccccgtctacgggcggcagcggagcggcagcagcacgggctcctcctccccgggcggcgtctccccgtcccaccaccgctcctcctccacctcctccgccgcctccgccgccgcggggctgggcggcggcgtctccaacgtgcgccgcacgcagaacgtcgcggcgcgggcggccgccgcgaggctggcccaggtcatggcgtcacagagcgccgcggccgccgcgggccgcgacgacgacgacgacgacgacgactacgccaatgaccacccgcccgcccctccccccgcgaggttcggctccgcgcgccccgccgtggcgcacggcagccacggcgtctcgttgctcggccgcaccgcgagatcttcctcccctgcgttagggaggaacattgtagagccaccttctactgt

SEQ ID NO: 42876 - DNA, 410 bp, Oryza sativa
  Clone ID: uC-osroM202026f12b1
tcttttcttcttcatcgcaagctagtcagagtgggtcgacgatgatgaagaagctggtgaggctgctgatcatggtggaggtggtggccatggcggcggcgccgcggagagcggcggcgctgagcatggactactacgggatgagctgcccgttcgcggagatggtggcgaggagcgtggtgagccaagcgctgatgggcgacccgtcggtcgtcgccagcctactgcggctacacttccatgactgcttcgtccagggctgtgacgcctccgtcctcctggacttcaccccggacaacaccgccgagaaggacgcgctcgccaacaagagcctccgcggcttcgaggtcatcgaccgcatcaaggacgccctcgagtcgcggagccccggcgtcgtctactgcgccgac

SEQ ID NO: 42877 - DNA, 255 bp, Oryza sativa
  Clone ID: uC-osroM202026g02b1
cttcatatccgtgccgactgcatatacccgccacgggctacttctcctccgactgtgagtttttgctcttccttgatctttggcccgcgagctgatatctgcagattgcaacccagaagagaaaaaaaacgaaccgagttttattttaggtcggcgggcggctaaagaaagaagggagctttttgggtaaaaatttagacttgtttttttttccttcgctggatggggctggggttttcagggatggggggaaag

SEQ ID NO: 42878 - DNA, 285 bp, Oryza sativa
  Clone ID: uC-osroM202026g03b1
cagaggtggacatccgaatatctctggcaaacaaaaaaaaaggaagggatgtgaagtttacatgcagggacgcttattgaaaaggtcaaggagctctgctcttcctgaggccaaattctacgaaagcatgtggaaggagatgaccaagcacacagccgaagacggcaaagctggatctggagctgaatcgaagcaaggatcggaacctgttactgctgcctaaggacaggacactcacgacatatcttagattttgcgtgctggctaatctttgtcctattgtaa

SEQ ID NO: 42879 - DNA, 360 bp, Oryza sativa
  Clone ID: uC-osroM202026g04b1
gcttgtgaacaccgacccgcatcgcatctgatcggggtccgcttaatcctcgacctcggtatcagccgcagcaagggaagggtaggaatcctcgcccaaaaggccgtcgtctacccttgcggattcagaccaggattttctatgtacgtgtctggtcgactccggcacggtggacgcttccgtctccgggatcgcggggaccaccggagcctgagggacgttccatggctaacaggaccgttgcaaagagcctgccacggtgcgctgaaccaggactcctcgccgcccacgacacaatactggctgcacgtttacctcggccagggcttttacatcgtaacctacagactttggacctac

SEQ ID NO: 42880 - DNA, 430 bp, Oryza sativa
  Clone ID: uC-osroM202026g06b1
ctcattcatggcgtgcacggctccacgggaggaggacctcctcatggaggaagacgagcaccggccgcctctcaaccgggccctgctccaccgcagcgccaccaacaacacctcccaggttgccatggtcggctccaacccctgccccatagagagcctcgattacgagataatagagaacgacctgttcgatcagaactggaggtcgagagggaaagccgaccaggtgcggtacgtggtgctcaagtggaccttctgcttcgccatcggcatcatcaccggcatcgccggcttcgtcatcaacctcgccgtcgagaatgtcgccggtcttaagcacaccgccgtgttcgtcctcatggagtccagcagatattggacagcgttctggctgtttgccggaaccaacctggccctgctggtgttcgcgtcg

SEQ ID NO: 42881 - DNA, 189 bp, Oryza sativa
  Clone ID: uC-osroM202026g08b1
aatctctctgccaaacaaaaaaaaaggaaaaaaaaccaccgcttttcgcagtgcgcttcttctctctccctctctgctctgctcttcctgagctccgcggcaaggaagcttctggaaggctctgcgggatgacgacgagcagctggggtggtggtggtggtggtggcggtggcaccaagcttctgtcaa

SEQ ID NO: 42882 - DNA, 367 bp, Oryza sativa
  Clone ID: uC-osroM202026g09b1
cagaggtggatataagaaatcacttgaaattgatcctgataacagggatgtgaagttgacatacaagaacctcaaggaaaaggtcaaggagtacaacaagaaggatgccaaattctacagcaatatgttcgccaagatgaccaagcagccagccgaagacggcaaagctggatctggagctgaatcgaagcaaggatcggaacctgttactgctgcctaaggacaggacactcacgacatatcttagattttgtgtgctggctaatctttgttctagcggtgcactgatgagaaacgttacttcccaagttgtcgggcgatgatgattcttgttgagattttcaaattgcaatccatattttgaacc

SEQ ID NO: 42883 - DNA, 473 bp, Oryza sativa
  Clone ID: uC-osroM202026h01b1
cgtgtttcaaatctgatcagttcgatttcgatcgagtttcacccaaagtccacacaaactttcgattcgatttctccgatctcgcagcggtggcggccatggcgcagaggacgctggagctgacgctgatctcggccaaggatctcaaggacgtgaacctcctctccaagatggaggtctacgccgtcgtctcgctctccggcgaccgccgctcgcggcagcggatcgccaccgaccgcgccggtggccgcaacccggcgtggaacgccgccccgctccggttcaccgtcccggcctccggcgcgggttccctccacgttctcctccgcgccgagcgcgccctcggcgaccgcgacgtcggcgaggtccacatccccctctcggagctcctctccggcgcccccgacggcgcccgtcccgccaagttcgtcttctaccaggtccgcaagatctccttcgggaagccacagggc

SEQ ID NO: 42884 - DNA, 385 bp, Oryza sativa
  Clone ID: uC-osroM202026h03b1
cgttatattgttctaagcattatccttcactaccggggacgaatcctgtgcgcaatgcgtatacgctctggcttttatctgttatatgtgagatttggaacgctttgaactggatattgcatcatttcccgaagtggtttacaatcaaccgtgatacctaccttgatcggatgtgctagaggtatgacagagaacgtgagccatctgagatgactgctgtcgacatttttgtcagtacagtcgaccccatgtacgaacctaacgttgttactgagaataccgagcatatcaattatgttggtgattactcaggggacaaggcctcttgctatgtctctgaccatggtgcatgaatgctgacttttgatgcatcggctgaaacttc

SEQ ID NO: 42885 - DNA, 469 bp, Oryza sativa
  Clone ID: uC-osroM202026h04b1
catttttcaactcgagctcttcttctacttaaaagaaaaaaaacacgcatatctagtagtactgttctagtgttcttgtacttctattcgtgtgctactactgcatctgtgagtctgtgtgactgtacacatctgtaatggagtgcgaaaccgggcttgttcgttccctgaacggcgacgggctgtgcatgtcgtcggtgtcggcgccgccgcgggccgacccactgaactgggggaaggcggcggacgagctggcggggagccacctcgacgaggtgaagcggatggtggaggacttccgccagccgctggtgaagatcgagggcgccagcctgacgatcgcgcaggtggccgtcgtggccgccggcgccggcgaccccagggtggagcttgacgagtccgcccgcggccgcgtcaaggccagcagcgactgggtcatgaacagcatgatgaacggcaccgacagcta

SEQ ID NO: 42886 - DNA, 454 bp, Oryza sativa
  Clone ID: uC-osroM202026h06b1
tcttgtacaagcactccatcaaaactaagctagctactacaagtcctagggcttttgctacctatagctagctagcttccggtcagaagaagctaaggagaattagaagctatgtctacctagcttggaggaagaagaagaagaggaggagggattgcggcgcgatcgatcgacacgcgtcgtctaccgataaattcctcgcaaaatcaatcgatatcatatcgatcgagtctagaggtgatgagatcagatgtgaagtacttgaggagctgatttggtgataggatcgatttaattgctagctgaggtgatcatcatcaaggagaagaaagagatagtttatttgctactggggatcagtgtgtttgcatgggggataggccatggcagcagcagctgcagccacatgatcagcaggcggcttcttgctcagtcacggccgggatgatgatgc

SEQ ID NO: 42887 - DNA, 109 bp, Oryza sativa
  Clone ID: uC-osroM202026h07b1
tgataattaacgacacgagctgcgacaagcggggggactttataaacctaaagggcgcatgctacccggcagatgcaaggtgggcgaactagtatctattgccacacag

SEQ ID NO: 42888 - DNA, 545 bp, Oryza sativa
  Clone ID: uC-osroM202026h08b1
ttttattcaaacgcgaggtcgttgaaattgcaaccaatgcattggatgtcttcaaaagtgatgcaaaaaagatggtagttgcacttgttgatatggagcgtgcctttgtcccaccacaacacttcatccgtttagtacaaagaagaatggaaaggcaacgtcgtgaggatgaggtgaaaaacaggtcatctaagaaagcccaagatgcagaacagtccaacaagggctcaggcacaggatctgagcaatctggtggtgccttgaaatcgttgaaagaaaaattcagtcagcaagacaaagataaagatgcaaaagagggaccaaatttgcaggttgctgggcctggtggtgaaataactgcaggctaccttttgaagaaaagtgcaaaaaataatgaatggagcaaaagatggtttgtcctaaatgagaagagtggaaagcttgggtacaccaagaaacaagaggagagacattttcgaggtgttattgccctggaggaatgtcatctggaagagatagaaaaagaagagctttccaagagtttg

SEQ ID NO: 42889 - DNA, 476 bp, Oryza sativa
  unsure (1)..(476): unsure at all n locations
  Clone ID: uC-osroM202026h09b1
tctaaatcccccaatccgatctgcctttcctctggctcctcgtcaaaccctagccaaatccacgatcggggctagctcgtcggcggcggcgatggggaacccggagaagctgatgacccagatcttcgacctcaagttcacctccaagtcgctgcagcggcaggcgcgcaagtgcgagaaggaggagaaggagcagaagctcaaggtgaagaaggcgatcgagaaggggaacatggacggcgcgcggatctacgccgagaacgccatccgcaagcgcaccgagcacatgaactacctncgtctngccttccgcctcgacgccgtcgtcgcgcgcctcgacacccaggcgaagatgcaggtcatcggcaagtccatggccaacatcgtcaagtcgctcgactccgcgctcgccacggggaacctgcagaagatgtccgagaccatggacaacttcgagcgccagttcgcaacatgga

SEQ ID NO: 42890 - DNA, 553 bp, Oryza sativa
  Clone ID: uC-osroM202026h10b1
ccttagctttgccgagacctcgttgcctcaagccgtgttgcgtgctgcatgctctgaattgaagaactctcttgagcctgaccaggtatatcagaagtggagaagaagattggaagcatgagggaaatgggagagaagaggaggcgtggacaccttaaccctgctggttttgcaggagggttgcatgatcatgaggagaagaagaacgaggagcataagctagacatgagtggcatgtccatggatgccctcccacacctcaccatgtctcttggtcaagtcaccatcttggatctctctaacaacaatcttgagagcatcccggagtcaataatcgctcggctgctgaacgtggtggtgctggacgtgcggtccaaccagctgaaatcgctgcccaactccatcggctgcctctccaagctcaaggtcctcaacgtctccggcaacctgctcgagtccctcctcaacaccatcgaggagtgccgtgcgctggaagagctgcacgccaacttcaacgagctgacgaagctgccggacacgctggggttcgagc

SEQ ID NO: 42891 - DNA, 533 bp, Oryza sativa
  unsure (1)..(533): unsure at all n locations
  Clone ID: uC-osroM202026h12b1
cttcagtcctcttctcttcttcctccctcccttggcccactgaatcgccaaaaaaattcccctcctccactccatctctataaaaatcctcccccaaatctcgcctcgtttagccagcacaactcacacaactctctctctctctctctctctctctctctcgacggctgcaagcttccgcctcccggatcgcggcgaccaccggaggaggagggagcagccatggcgaacatcgacatggggaagatcctggcggggctggagaacgacgacgcgcgggtgcccaagaccaagctggtctgcacgctcggcccggcctcccgctccgtccccatgctcgagaagctgctccgcgccgggatgaacgtcgcgcgcttcaacttctcccacggcacccacgagtaccaccaggagaccctcgacaacctccgccaggccatgcacaacaccggcgtcctctgcgccgtcatgctcgataccaagggtcctgagattcgtactggatttttgaaggatggcangccaatcaagct

SEQ ID NO: 42892 - DNA, 413 bp, Oryza sativa
  Clone ID: uC-osroM202028a01b1
caagcgacgccgcaagtttctaagcagcagcagcagattcgtccgcgtcgctctgtctgacagtgtgggccctccccgagatgcaggcgtggttctccggcacggggccctccgcctcgtcggcgtcgtcgtcgtcgtcgccgccgcagccgtcgctgctcgcggaatggaactcctacgccgccgcgcgctccgcggaggaggaggaggacggcggcgggggaggcttcgggatcgacatcgaggccgccgtccgctccgccaacgaccgcgtctccggcaccttcggcgtggtatctaaaggtgttctagggttgccaggcagcttcaagtccacaacaagcagtgttccatcgagcaaatcacttgtgtattttggcctttttcttgctagtggaatattcctagttttc

SEQ ID NO: 42893 - DNA, 423 bp, Oryza sativa
  Clone ID: uC-osroM202028a03b1
ttcttctcttctcgtgccttctagggtttcctcttcctcgcaccgcgccgcctcgcctcttcgtccccagattcagatctactcctactcctactaccaaggttgttgccatggctcccgctgttgaagccgtggagaagaagacaggctcagcccccgtcaaggcccctgctctgaatgaaaggatactgtcatctatgtcccggagatctattgcagcacatccatggcatgatcttgagattggacctggtgcaccaactatattcaactgcgtcattgagattcctaggggcagcaaggttaaatatgaacttgacaagaaaactggactgatagtggtggaccgtgtgctctattcatcagttgtgtaccctcacaactatggattcattcctcgcacgctgtgtgaagacagtgatc

SEQ ID NO: 42894 - DNA, 437 bp, Oryza sativa
  Clone ID: uC-osroM202028a04b1
ttcagatcccgcacgccgccggtggccgcagcgccgccgtcgcccaaaccctagccggcgggcgggcgcagtagcggagatctggtaccgtgccgcgatgggggacttcaacgtggcgctggtgatcgtggcggcggtggtgagcgtcctcgtcctgctcgtcagcgtctacctgctcatcaactaccagcaccccgacgacgccaaccaggcctacttccccaagctcgtcgtcgtcctcggcatcaccgtcgccctcctctccatcctcatgctccccgccgacgtcgccaaccgccaggcctgccgccgcgccatctacagcggcgcctgctccctcaccctccccatgaagaccctctggctcgccgtctacatcgccgacgccgtcctcgtctttctcgtcatccccttcgccatgttctactacgagggcg

SEQ ID NO: 42895 - DNA, 445 bp, Oryza sativa
  Clone ID: uC-osroM202028a05b1
ttcgatcggcgggtacaacatacccaagggcgccaacgtgatggtgaacgtgtgggcgatcgccagggaccccaaggtgtggacgcaacccgctggagtacaggccggagcggttcattgaggagaacatcgacatcaagggcagagacttcagggtgctccccttcggcagccggccgccgcgtgtgccccggcgcccagctcggcatcaacctcgtcgcctccatgatcgggcacctgctccaccagttcgagtggtctctccccgagggcaccaggccggaggacgtcaacatgatggagtgcaacggcgtcgtcacgttcatgagcacgtcgctgcaggttatagccaagcccaggctcgacaacccggacctgtacaagaagatccctgtcgagatgtgatcgaacagtttgctttgctgcctgctgctgctggttatac

SEQ ID NO: 42896 - DNA, 444 bp, Oryza sativa
  Clone ID: uC-osroM202028a06b1
ttgtattgcaagaaggatatcttgttggttctggtggacaaatcaaaactcctaaatctgaaagggaagcaatgcagattccaacatcctccattggttgcaagccataacttgccgtgctcgctagagtaagtggtgatgatctcgtggccggcttggatgaacagggcaacatctggagggcgcatatcacatccttccagacactatgacgatgtcagtaacaccaatgagtatggctataatatgaatttaattgaggtggatatgatggtagcagagggtagctcaagagcaccgttgcttaattgcagagccaattttgttggtctacttcaaggaggtggtaaggaatgtttttcatgctttggttcactttctgatatatgtaagaagctaactgagtggggaatttttcctcgagagaaggtgatttaacaaaag

SEQ ID NO: 42897 - DNA, 422 bp, Oryza sativa
  Clone ID: uC-osroM202028a08b1
ttttatgcatcttttcctgttcttgccaaaggaatgaactgggtcttgctatacagcacatggaggcatggaatatctttgtctactctatacagaaggagcatgctttgccctggttactctctcttggtagttggggataaagaaggtgcagtttttggcggtttagttgaggctccattgcatccaaccagtgcaaagaaatatcaggggagcaatagctgctttggtttcactaatttacacagcaatcctagtatatatcgaccgactggtgcttataactatttgacagtgtgctgcaacgactaattggcattaggaggtggaggtcatttcgcactgtatctacatgccgaccatgtgagtggtttaagttccaatttagagacttttaacaacatgtgtttatttcattcccc

SEQ ID NO: 42898 - DNA, 315 bp, Oryza sativa
  Clone ID: uC-osroM202028a12b1
tttgattgcaagaaggatatcttgctgggagttgtgagctaattaaatcttctaacattgaaagggagacaacgcacattaccacatccttcattggttacaagccataccttgcggcgctcactagagtccatgtgaactacatgcttggcggcttgtacaagcaggtgaacatcaggatggcgcatgtaacatccttgcagaccctatgacgctttaagtaccaccaatgactctggatgttatatgactttcattgaagaggatttgacagtaacataggcctgcttaagatcacgaccacctaattctact

SEQ ID NO: 42899 - DNA, 293 bp, Oryza sativa
  Clone ID: uC-osroM202028b01b1
gtgccctcctctcctctcctaccctcttcttcctcctcctcctcctcgcctcccaccaaaccctagcacgagcagcccaatccatctccagcctcacgagctccagttcggagcagcctcgcggtgggacgagtcgccagttggggagctcggaggaggtgaggccgtggttgggggttgggaagggggggaaggccaacaaatggcggagatggaggagggcatggtggcggcggatggccgagcggtcgctggggtctacaagatgcttagtactaagttgcacctgttgc

SEQ ID NO: 42900 - DNA, 473 bp, Oryza sativa
  Clone ID: uC-osroM202028b02b1
ttgaaaagcatcacaaatctcacgcactgtctctcgttcgcgcaaagcacgctgcttttctccgctttgcgagcaccatagcctagcccaccatgtgcggcggcgccatcctctccgacctcatcccgccgccgcggcgggtcaccgccggcgacctctggctggagaagaccaagaagcagcagcagcagaagaagaagaacaagggcgcgaggaggctgccactgcgccaagaggaggaggatgatttcgaggccgacttcgaggagttcgaggtggattccggcgagtgggaggttggagtccgacgccgacgaggccaagccgctcgccgcgccccggagcggcttcgctaaaggtggattgaaaaacactacttgtgctggtgctgatgggcctgcagcaaggtctgctaaaaggaagagaaagaaccaattcaagggtatccggcagcgggcatggggcaaatgggc

SEQ ID NO: 42901 - DNA, 495 bp, Oryza sativa
  Clone ID: uC-osroM202028b03b1
tttagggctctttggcgcacgggcggcggcgttcggcggttcagggagcggtgtccggcgccggagcttgcagctgaagaggcggtatcttgctgaggctacaacatcgattttctccatccactcatctcccaaaaccaaagggaggctcggtgtgtagtcaaaaattgaaggagagggagggagagggtcacgggacagtttgcatggcatgatcatattttgctaaggttctattagagtgtcattcaatggcccatttcatggatttacgggctttcatcctgcgtgcacgtgttttaaagctttataggcaggccttgcgcatgactcgccgagctcctgtgcatgcatgcgatgagttgaggcaaactgtaagagctgagattgaaaaaaatcggcgttgcgacgattaacagaagattaaggtcttgatcagggaaagtctgcaacgaattaaaggccttgatgagatgcttgacatgacaggaaata

SEQ ID NO: 42902 - DNA, 487 bp, Oryza sativa
  Clone ID: uC-osroM202028b04b1
ttcaacctcttttgtcaactaggtcaatctgtttgtccatgccttttgttgtactgtacagctgtgctcttgaaatgttctcttttacagatgtacaatggtttcaattttcttttcctttcagtgaagtagaaaggcacaattttattgaaaaatattgttatgtgcagggatagtattcatgtggacctgctggtttgctattagttggaaatttgagataagaatagtttgtttccttattagttggggtttcctctttgtacatatctcctaggtattagaggagctaatcttagagagagagattctctttgcagtagtcattccaataaaaaattagcacatagccattagaaattaagcaatgtagatgaatcaatctggcctctctcccacaagtttttcattccaacctatagtcttctcttataccaaccaagtcaatgctaccctgtcaccctttaagtggtgtttggccataaca

SEQ ID NO: 42903 - DNA, 406 bp, Oryza sativa
  Clone ID: uC-osroM202028b05b1
ttcaccagtactagtacggctctaatcagttcgcgtttgctaattaactctgccatcatggctggagtacatggacttgcagctgcaggtctggtggtgctactcctcgccgccgttgcgccggctttcgccgtggactacaccgtcggcgacacatccggctggagcagtggcgtggactacgatacctgggcgaagagcaaaaccttcagcgttggtgactcgctcgtgttccagtacagcatgatgcacacggtggcggaggtgagctcggctgactacagcgcgtgctccgccagcaactcgatccagtcctacagcgaccagaacaccaagatcgcgctcaccaagcccggcacccgctacttcatctgcggcaccagcggccactgctccggcggcatga

SEQ ID NO: 42904 - DNA, 443 bp, Oryza sativa
  Clone ID: uC-osroM202028b06b1
ttttgcttaccttcctctcaggttccaaccaccataatcaaattactccaaaggccaagctcagcttccattcgtcccaggttctcagccctggctgctctgccaagatccatccatggctcctgtcttcttcctcctcctcttcagccaaatctttctctgcaccgcagtggacaccatcaactccaccacgccgctgtccgggacgcagaagatcgtctccaagggcggcaggttcgcccttggattctacaccccgccacaaggtaacaacaccgcctccggcaccggcaactactacatagctatatggtacaacaacataccgttgcagacgacggtgtggacggccaacagcgacgtgccggtgtctgacccgaccaccgcattcttgtccatcggcagcgatggcaatcttgtcctccttgatcaatccaagaaca

SEQ ID NO: 42905 - DNA, 438 bp, Oryza sativa
  Clone ID: uC-osroM202028b08b1
tcaagcccgggaggcgcacgggtggcggagccatccatggcacggagcgccgtgcggagccagatccgggggatgaaggtgcgggaggtgccggggtacctgaagccgcggctgagctgggagaacgtgaagaagagcagcgaccaggccgtcgaccgctacatcgacaagtacatcgagaccagctcgccggagccgctcttccacgtcatctacggcctcatggccttctcctacctcatcaacctccccaaggagcgccggcacctcgcccacctcgaggagctcgagaggcagggcgccgccggcgccgcccaccactagattcgaggtcaggacttggggtttggcttgggttgattcgatctaacagaatttctgttctttcaccgatgagctacctggagttgtgatgatgttcgtttgaatggttatttt

SEQ ID NO: 42906 - DNA, 417 bp, Oryza sativa
  Clone ID: uC-osroM202028b09b1
gtaggggttctttgacaggttgacggggaggaacaaggaggcgtggaaggaagggaggatccgtgggacggcggtgctggtgaagaaggacgtgctcggcctcggcgacttccacgcctccctcctcgacggcgtccacaacatcctcggccacaaggagggcgtcgccttccgcctcgtcagcgccaccgcccgcgacccaagcaatggagggagggggaagctggggaagccggcgcacctggaggagctggtggtgacgatgaagtcgacggcggcgggggagtcggtgttccgggtggcgttcgagtgggacgagtcgcaggggatccccggcgccgtcggcgtcaccaactccaaccggtcccgagtcttccttaagacgctcacccttcacggcgttccccgcaagggcac

SEQ ID NO: 42907 - DNA, 409 bp, Oryza sativa
  Clone ID: uC-osroM202028c01b1
ttaaaatttgcagctcgtataggacagtaaacgaagaaaccatcgtcgtacgtcgtccatgtctgacgcccctcccatggccgagaaaccaactatcaaggtggagacgacgccgggagactggaggttcccgtcggccaaccagaccaagcgatgcttcacgtgctacatcgagtacaacaagtgcatagaagccaagggtgaagggtccgacgagtgcaccaagtatgccaagtgctacagatccctctgccccggggaatggatcgagaggtggaaggagcagagggcaaacgggactttcgctgggcctctctgaaacggggacagcgaccgatcgatcgaccatatctctacatatatcgatcggctacagctaataataccaatcaatcctgtatgcaatgtc

SEQ ID NO: 42908 - DNA, 414 bp, Oryza sativa
  Clone ID: uC-osroM202028c02b1
ctcctactccatcgttgcttctccgatgcttcacctcgtcgccctaaatttatcacccagaggcgacttggcaagaggaggccgcggaggagagagagattgataggtagacagatataggtagtgatcgatactagcttcaaaaggagggattttttgttgttcttggatctttagagagagagagagagagagagaggagatgccgaccggggcgatgaagaggctgttcgttgagtcgtcgtcgtcggcggcggcgtcgaactccggcagggaggcggcggtgctgtgcgcgccgcggccgaggagggtccaggtgcacccttgcagcgctgacctcatcctcggcccttctccttttctcctctcctccaacaacaccaacaagcaaagggaagggaagagtaaggagga

SEQ ID NO: 42909 - DNA, 438 bp, Oryza sativa
  Clone ID: uC-osroM202028c03b1
ttctcccccaaatctactttgcgtcctctcgattcctcatcaaccatgtcggcctactgcggcaagtacaaggacgagctcatcaagaacgctgcctacattggcactcctggcaagggtatccttgctgcagatgagtccactggcaccattggcaagcgctttgccagcatcaatgtcgagaacgttgaggagaaccgccgctctctccgcgagctgctcttcaccacccctggtgccctccagcacctaagtggtgtgatcctcttcgaggagaccctgtaccagaagaccaaggacggcaagcccttcgtcgatgtcctcaaggaggggtggtgtactccctggcatcaaggttgacaagggtaccgctgaagttgccggcaccaacaaagagaccaccacccaaggccacgatgatccttggaagcgttgcgc

SEQ ID NO: 42910 - DNA, 416 bp, Oryza sativa
  Clone ID: uC-osroM202028c04b1
tcaaccctcgtgaccaacccatctccccaccaaccccggccgccgccatgaccggcgccgtctccaagctcgccgccccgaggccggcggacgccgagccgctcccgccggcgtccgtccgctgcgcgttcctcgcctccgccccctccccgcgccgcttctccgtctccatcgccgccggccgcgccaggagccccatcattgcgatggcttctgccaaggaaggaaatggtgccccaacgaagaggacaacccttcatgatctctatgatctccagggtcagtccccgtggtacgacaacctctgccgtcctgtcaccgatttgctgccccttattggcagcggggtccgtggagtcaccagcaacccatcaattttccagaaagccatcttgacttccaatgcatacgatgac

SEQ ID NO: 42911 - DNA, 438 bp, Oryza sativa
  Clone ID: uC-osroM202028c09b1
tttcaaatgagcaaaaaaccagaaacaggagcacgtctattcataggaggatttcctcgctacacagagaaaacagaattagaagaattttgttcaagatttggtaaagttaagcataccgacctcgttccttttagacaagtcgcttttgttacttttacctccaaagaagaggcaactttggctatgtttgggatacaacaacaggtttttaagggttctcatttacgcgtcgattgggcaaaagttcgtcaggataaaaaagatgcaaagtccgaatctgcacctgctgctggtgtgaaggctgatagtcaacctggtgctaaagattctgctaaagatgtcgctcctgctaaagaaagatatatccccggagatacgaaagaatctgctgttaagtctcaagaaaatatacaagttcaagtaacagaagatgtt

SEQ ID NO: 42912 - DNA, 434 bp, Oryza sativa
  unsure (1)..(434): unsure at all n locations
  Clone ID: uC-osroM202028c10b1
acggaggttaccaccgcccacacgcccccgctgctgctcctctcctgcaccacctgcgctgcttgcgctccacgccggcgccgcgccgcccaaaccctagcccagcccagccaactcccccccatgccgaacgcctctcccctccaccacctcgcctccctcctcctccttgccctcgccctcgcgccgcgccccgccgcgcccgcggccacggaccgcgcggcgctgctggccttccgcgcgtccctcccgccgccctcccgcgcggcgctcgcgtcgtggcgcggcccgctctcggagtcctggcgcggcgtttcgctccacccgccggccgccgncggcgcccccgacccggacccgtcgccctacgtntacgggctcgcgctgcgggggctcaacctgtcggggcagctcccggcggcgccgctcgcgct

SEQ ID NO: 42913 - DNA, 414 bp, Oryza sativa
  Clone ID: uC-osroM202028d01b1
ttgccatggaggcgcagaaggtcgagatcgaccgcaccgcagcgctccaggtgcgccgtgagctttggctggggctggcatacctcgtcgtccagactgccggcttcatgaggctcacattctgggagctctcatgggatgtcatggaacccatctgcttctatgtgacctccatgtacttcatggccggctacaccttcttcctccggaccaagaaggagccctccttcgagggcttcttcgagagccggttcgcggcgaagcagaagcggttgatgcacgcccgggatttcgatctccgccggtatgacgagctccggcgagcctgtggcctgccggtggttcggactccgacgagcccctgcagaccgtcgtcgtcgtcttcgacgcaggagagccattgccattcttact

SEQ ID NO: 42914 - DNA, 285 bp, Oryza sativa
  Clone ID: uC-osroM202028d06b1
tcatattcatcgagcttgatcggatagcacttgccggatacaccttttgctgcatgctactgatgttctgtggccttgtcggctcatggcaatatcacaccccagactgaatcagacatgtgaggtgtcccaaatgctccagtgttcatcaagagccaacctgggcgccagaataccaatgcggaggatgcgggactaccctgcgagtgaaaaaccagactggcaaattacaggacgtgatcagcgctccctcctcttcggggagtggactgcactctcacagca

SEQ ID NO: 42915 - DNA, 356 bp, Oryza sativa
  Clone ID: uC-osroM202028d10b1
tctgattggggggggtggccctcatttccaggtcttttttcatgaggccaccaaacttcaaacaagatgaccttaccgacgttctatgcaaccatgtcaggtcaaaatggaaacttggccaatacaaaaatgtaatacaatttgacaaagtttgagttgaaaccctttcacgatctacccataaatataacatgtgaactcaaccagagactcacaaacgagccttgcgtgctgagatcccagctgccttcattgcgtcaggattgaccaaggaattcgccagtgctcggaatttacaatcaaccacttactgtatctttggcagaacaaaatcacgcatcaagctatctggagct

SEQ ID NO: 42916 - DNA, 421 bp, Oryza sativa
  Clone ID: uC-osroM202028d12b1
ttcacagacatcgagcttgatcggttagcacctgccggatacaccttttgctgcatgcgagtgatgttctgtggccttgtcggctcatggcaatctcagacgccagagtggttcgccatgtgaggtgtcccaaatgcttcagtgttcttcaggagcccaccggcgcgccggtgtaccaatgcggtggatgcggcactaccctccgagcgaaaaaccgcaccggcaactcacaggaggtgatcagtgctccctcctctttggggagtggcctgcctcctcacagcaagcacctgggctccagtgatgttgcaagcaccagtggatccactcctgaagctcaaatcagcagtgggcagcaaggagctgacatgacaagccgacgcgagactgatgatctcgtgtcggcgaggaacaatgcttc

SEQ ID NO: 42917 - DNA, 402 bp, Oryza sativa
  Clone ID: uC-osroM202028e02b1
tgggacctgaggccgagcgtgagacgtgctggacgcggaccgcgacggttgcatcagccgggaggacctcaagatcgatctacgccagcggcgcggtcaccagtgagcggttcgacaacaaggacatcgccgtcatgatcgccggagccgacgtggacaacgacagggtcgtgcagtacgacaagttcgagcgcctgctggggcacgccgccgcgggggcggggtgcccgcccgcgatggaggacgtgctccgcgtgatggaccgcgacggcgacgggaaggtggggttcgacgacctcaaggcgtacctacgctgggccgggatgccggcgggcgacgaggagatccgcgccatgaacgcgtggccggcggccgagacggcgatggttgcgtggggctcga

SEQ ID NO: 42918 - DNA, 384 bp, Oryza sativa
  Clone ID: uC-osroM202028e03b1
ttatggcttgcctctatgccggcatcaacatcagtggaatcaacggcgaggtcatgccaggacagtgggagttccaagttggcccgtctgtcggcatttctgccggtgatcaggtgtgggttgctcgctacattcttgagaggatcaccgagatcgccggagtcgtcgtctcatttgaccccaagcccatcccgggagactggaacggtgctggtgctcacaccaactacagcaccaagtcgatgaggaacgatggtggctacgagatcatcaagtccgccattgagaagctcaagctcaggcacaaggagcacatctccgcctacggcgagggcaacgagcgccggcttaccggcaggcacgagaccgccgacattaacacct

SEQ ID NO: 42919 - DNA, 356 bp, Oryza sativa
  Clone ID: uC-osroM202028e05b1
ttttgctgcttccctcgctgtcgactcggctcgggccggtgcttttttaagtgacgtgagaagaaagcgaggcatcgaatccaatccaatccaatccagagtgggggtaaaaccagcgatttttgagggggcattttctttcatttttttactttttggttggcttgggattcgccgccggtgtccgatggagcggttcgtgcagttcttgaggcggggcaatggtttgatggccggcgtctctggcggtggggagctgcgcggaggaggtggcgaaggcggagggggccgggtgcagggacgacgcggcggcgctgaggctcaagggggtggccatggcaacgatactggtggcc

SEQ ID NO: 42920 - DNA, 363 bp, Oryza sativa
  Clone ID: uC-osroM202028e06b1
tttccgacgcgatcttttttatacagagcgcttctgctttgagcaatggccaacctcaccgacctcggtaacctcaacctcagcgactgcagcgacaagatcatcgccgagtacatctgggttggaggatcgggcatagacctcacgagcaaagcgaggactgtgaaaggccccatcaccgatgtgagccagctgccgaagtggaactacgacggctccagcaccgggcaggctcccggcgaggacagcgaagtgatcctctaccctcaagccattttcaaggacccgttcaggaggggcgacaacatccttgtgatgtgcgactgctacacgccacaaggtgagccaatccccactaacaag

SEQ ID NO: 42921 - DNA, 391 bp, Oryza sativa
  Clone ID: uC-osroM202028e07b1
ctcaccaccaccaccaccaccaccactacacactttgctcatctgatctgcctccttccctcctatgggaatccaaacccgccgcatgccgattcatgtcctgccgctccacatgtagacggccctcgagctcgactacataggcctgtcgactccggcgccgccgccctcctcctactccgacggcgccgaccgcgcggacgacgtcgacctgaagggcaccgagctccacctcggactacctggctccgagtcgccggaccgccgacctgcggctattgccgctgccgatgccactgccaccacccttgagctgctgcccgccaagggtgccaagcgcgtgttccccgaccaggccgcgctgacgccgaccactgccgccgccgggaag

SEQ ID NO: 42922 - DNA, 386 bp, Oryza sativa
  Clone ID: uC-osroM202028e09b1
ttccattcgtttttgagttcctcgtttgctccgcctctctttcactcatgggcaagattaagatcggaatcaatgggttcggccgcatcggcaggctggtggccagggtggcgctgcagagcgaggatgtcgagctcgttgccgtcaacgatcccttcatcaccaccgagtacatgacatacatgttcaagtatgacaccgtccacggccagtggaagcatcatgaggtcaaggtcaaggactccaagaccctcatctttggcacgaaagaggttgcggtgttcggctgcaggaaccctgaggagatcccatgggctgcggctggtgctgaatacgttgttgagtctactggtgttttcaccgacaaggaccaggcagcagctcac

SEQ ID NO: 42923 - DNA, 450 bp, Oryza sativa
  Clone ID: uC-osroM202028e10b1
ttttgatacaagtgtcatcccgcatccaacaaccatggactccttgtatgatatctcctgctttgctgctggtcttgcaggcaacatctttgcgcttgctctcttcctgtcgccagtgacgacgtttaagaggatcctgaaggccaaatcgaccgagcgattcgacgggctcccttacctgttctcgctgctgaattgcctcatctgcctgtggtatggacttccctgggtcgccgatggcaggctgctcgtcgctaccgtcaacggcattggagcggtgttccagctcgcctacatttgcctcttcatcttctacgcggacagcaggaagacgaggatgaagatcatagggctcttggtgctggtagtttgcgggtttgcgctagtttcacatgcgagcgtctttttctttgatcaaccgctttcgcagcaggttgtgggagctgtgag

SEQ ID NO: 42924 - DNA, 486 bp, Oryza sativa
  Clone ID: uC-osroM202028e11b1
ttttggtttcatgccaaaaggtttttgaaggcccccttgtgaattccctgttgtccatcagacaaggaggcctcaagatgtacatcatagaggacaaagggggtgccattgccctcatgctggcctccctcttcttcctggggacatggcctgcggtcctcaccctcctcgagcgccgaggccggctcccgcagcacacctacctcgactactcgatcacgaacctcctcgctgcggtcctcatcgcgctcaccttcggtcagctcggcgatagcaagcccaacatgcccaatttcttcacccagctcagtcaggataattggccttcagtgctgtttgcaatggcagggggtgttgtgctcagtatagggaacctctctactcagtatgcatgggcatatgtaggtctctcagtgactgaggtcatcagctcaagatgggtggtggaataggcacaacactgaatattttctggacaaccggatc

SEQ ID NO: 42925 - DNA, 361 bp, Oryza sativa
  Clone ID: uC-osroM202028f01b1
tgttcctccacactttgaggaaacgtctaagcacaagtgctaaacgcgattagaaggcagcgaaatcgtacactaaattgcacggattagagatagatctcaagcaatgggggaggagaaagtggcgccgaagtctgacgctgccccggcggtggagttgctggggttcgtgatgagcgcggaggaggccgagcgcgccgcggcggcggccggggtggagacggtggaggacctgctgccgctgctcgtcccttccgcgatgcggcgcgcgcgtgccccgatctcgcggttccccgtgggcgccgtgggcctcggcgcgagcggccgcgtttacgccggcgtcaaccttcgagttccgggg

SEQ ID NO: 42926 - DNA, 296 bp, Oryza sativa
  Clone ID: uC-osroM202028f02b1
gtccagatctagggcaaggcggtggccggagtttgagctgggcccgccggcggcgagatgaagcagtcgatgcggagccggcaggagccgcggcgggtgagcaacggcgtcatcatcgccgccatgctgctctccctctgcgtcctcagcatcgtcaaggccagatactgctccacccccttcgttaagcccgacgaccagctacaggagcagatgaactccagcatcaggatggagaccgacgagccggcgaccatggcggcgggagagcaagaggaggacgaggaggaggagag

SEQ ID NO: 42927 - DNA, 412 bp, Oryza sativa
  Clone ID: uC-osroM202028f03b1
ttttcttctcgtcctctccacgcccccgagatctcaggagcacaggaggaggaagccatggcgtcggagaccgagacgttcgccttccaggccgagatcaaccagctgctgtccctcatcatcaacaccttctactccaacaaggagatcttcctccgcgagctcatctccaactcctccgatgcattggataagattaggttcgagagcctcacggacaagagcaagctcgatgcgcagccggagctgttcatccacattgtccccgacaaggctagcaacaccctgtcgatcatcgacagtggtgtcggcatgaccaagtcggacctcgtaacaacctcggtaccatcgccaggtcggggaccaaggagttcatggaggcgctcgctgcttgtgctgatgtgtccatgat

SEQ ID NO: 42928 - DNA, 388 bp, Oryza sativa
  Clone ID: uC-osroM202028f04b1
gtggaacgcgtacttacccacaagttaggtgcatgccatggcaccattcatggcgtgcgcctcgccaccggtactcacgctggccctgctcgcgtcgtgcggtgcccttctcgccacctccatgctcccggcgcgtgcgacggcgggcagttgcttggacgtcggcgacatggtgatgatggacaggttccgcgcttggcagggagctcacaaccggtcgtacccgagcgcagaagaggcgctgcagcggttcgatgtgtaccgccgcaacgcggagttcatcgacgccgtcaacctgcgcggcgaccttacttaccagctcgccgagaacgagttcgcagaccttaccgaggaggagttcctggccacgtacaccgggtactacgcc

SEQ ID NO: 42929 - DNA, 135 bp, Oryza sativa
  Clone ID: uC-osroM202028f07b1
ttccttatcagtgtgagggagcttgtcacagcgcgcgctcaacacgaatacagggcagcgaaatcggacatttcatttcccgcattagagtgggatcttcagcaacggaggaatcatagcccacatgctactctt

SEQ ID NO: 42930 - DNA, 469 bp, Oryza sativa
  unsure (1)..(469): unsure at all n locations
  Clone ID: uC-osroM202028f10b1
tttggcttcctcttcttcgctcttgagagatttgagctgagagagagagagagagaggagggctctcgatcgtcttccttgttgcgcgcgcgcgttctctaatcgaagtcgataggataggaggatagtctcccccgcttgactcgatcttctccttcctctcaaccggggaaagcaaggccatgggcaactgcgccagcgccatagattccttcttcttcaccaaaagggccaataacgagaacgacgatgacgatgctgccccaggaatgtctgcatccaagaggactactagctccaccaccaccgggaagctgtcaacacttagtaacagtactttcattccatccaccattagcggtgtaagcactgacgatgcttatncagacggccagattcttgagtccccaaatcttangatcttcacctttgctgaactcaagatgctaccaagattttaggactgata

SEQ ID NO: 42931 - DNA, 468 bp, Oryza sativa
  Clone ID: uC-osroM202028f11b1
ttctccccctgcgaagaaagaaaaagctttttctttttcctcccggcaaaccctagatcggcgccgccgccgccgccaccggggtactctccccggccggccagcccccgtcgattcggctctctggaaggctggcacaccggatccgcgacgtcgggggatggtgttctgctctcgccgtgggggagagtgtccggcgccggccggtgcgctggagaagtggaaatcgatctcctcgccggccggcggcggcggcggcttttcttcgccggatgtatccggtgacggttatttgattcttgtctctgttttctcttttttttccttgtatgtataaacgatttattttctcaagatagagaggaaaagctctgtatgctgttcttccgatggatagcgaccgtgcgcttgttggagcggccaaaggcgccggctttttccccggtatggtcttgtcgcatatgacat

SEQ ID NO: 42932 - DNA, 399 bp, Oryza sativa
  Clone ID: uC-osroM202028f12b1
tcttcgcactcaacctcatgcagatgcagttcactctccatagctaggagtagctactagcctaccactccactagctgcttgagcttgagctgagcccgccattgccgcgcgccatgcgcccaccgagctgaggcacacgaggcggcgagaggcagggcggtgcaagaacgcgatgcgcgcgctccggccgccgccggcaccggctccggctgtgtcgccgtcgccggcgccatcgccgtatgctgcgatgtttgaagggggtggcattagctcgccgcctgctccgaacccggcgacgtcgccggtgccagggccggcgccagccccggtgccagggagtgtggcggagcgggagttcgcgggcggacggcggggcgcggcgtcgagcagcctgagc

SEQ ID NO: 42933 - DNA, 422 bp, Oryza sativa
  Clone ID: uC-osroM202028g01b1
ttcatctgcacttgcactgcgccatggcggcctcgaccaccctcggcttatcccaccccaaaaccctagccgccgccgacgccgcggcccccaaggccccgacggcgccggccgtcgactccttcccggtctcacatgccgcctgcgcgccgctcgccgcccgacgccgcgcggtcaccgccatggtcgcggcgccgccggccgacggggccgccatgccgtcgctcgacttcgacacataccgtcttcaacaaggagaaggtctccctcgccggccacgaggagtatatcgcgaggggtgggaggaacctgttcccgctgcttcccgaggcggtcaagggcattaagcagatcggagagattggatgggggttttcagggcctcgacaagcccagaacctgagggaatcactagctgaagc

SEQ ID NO: 42934 - DNA, 429 bp, Oryza sativa
  Clone ID: uC-osroM202028g03b1
ttagttcttgacaagacgatcaagctggggattagacaaggtattgcgaaaggtttggctgccggattcacgggcctttccttcgccatctgggctttcctcgcttggtacggcagtagactggtgatgtaccatcatgaaagcggaggaaggatatatgctgcagggatttccttcgttttaggcggcctatcccttggaatggcactccctgaactgaagcatttcacagaagcgtcggttgctgccacaagaattctcgatcggataaaccgtgtgccagagataaatgctgatgaccccaagggacttattttggatcaagtccggggagagcttcagtttgagtctggccgctttgtttacccatcgaggcctaacatgactgtcctcaaagactttaaccttcagatttctgctgggcaaact

SEQ ID NO: 42935 - DNA, 409 bp, Oryza sativa
  Clone ID: uC-osroM202028g05b1
ttcctccacactttgaggaaacgtctaagcacaagtgctaaacgcgattagaaggcagcgaaatcgtacactaaattgcacggattagagatagatctcaagcaatgggggaggagaaagtggcgccgaagtctgacgctgccccggcggtggagttgctggggttcgtgatgagcgcggaggaggccgagcgcgccgcggcggcggccggggtggagacggtggaggacctgctgccgctgctcgtcccttccgcgatgcggcgcgcgcgtgccccgatctcgcggttccccgtgggcgccgtgggcctcggcgcgagcggccgcgtctacgccggcgtcaaccttcagtttcggggcctaccgctgtcccatttcgtacacgccgagcagttccttgtcgtcaacgc

SEQ ID NO: 42936 - DNA, 241 bp, Oryza sativa
  Clone ID: uC-osroM202028g06b1
cgagcgagcggtctagctgctagcttgcgctatggtggatgtgctatattgacccctaataccacagtccagatcgctgtagtgcttcgaaagggttttgacagcgatgaagaaacgatatgcactgagtgtttcaacctgaagacggacaacatgctgtggaaagctactgatgaacatgctgaacagcgtgacctccaaggccattaccaactgggatcatatagagttgaagagaaac

SEQ ID NO: 42937 - DNA, 461 bp, Oryza sativa
  Clone ID: uC-osroM202028g07b1
gatcgcgacttttcggaatttgcatcagacgctcggaatgttaggattgcaatagcaacagatgggtttaatccatttggtatgggtgctgtctcctacacctgctggcctgtgtttgtcatccctctcaaccttccacctggtgtttgcatgcagaaacacaacatgttccttagttggattatccctggacctgattatcccggcaagaaaattagtatgtacatggagcctctagttgatgacctactccatgcctaggagcatggtgtgcagacatatgatcgggccactaaacagaattttaacatgcgggtgtcatatttattctcgttccatgatcttccagactatgggatattttgtgggttggtgtgtacatggaaagatgccctgtccagtctgtttggaggtgctttaaggaagaccgctgaaagttggtggaaagtactccttttttg

SEQ ID NO: 42938 - DNA, 381 bp, Oryza sativa
  Clone ID: uC-osroM202028g09b1
gagaaactcagccatagtcgtcttcttcctccgcgaaggcgagagctcaggcgagctcgcgcgatggccatggcgagccccaccaacggcggaggcggaggcgggaacaaggtgatcagcctgcgcctgcagtactactgcgtgctcgcggcggtggtggtggcggtcatggtgctctcgctcgcgttcgtctcgccgtccgccatgggcgccgccgtcaggcagaacctcggctccgtcgtcgccgccaccgccgtcgtcggagagggagcggacgcctccgccgtcgacgccggagccggagtggcggctacaacggccgcagaggaggagcgtgagcaggccgcggcggccggggtggtgctgttcaacttcggcgac

SEQ ID NO: 42939 - DNA, 418 bp, Oryza sativa
  Clone ID: uC-osroM202028g11b1
ttcttttcctcttcttcttcttcttccctcttcttgtggtggtgggtttgacccaagaacggaggagggatagggcgggcggcgatgggggcagttcgggggattttggtcgtggcggtggttcttgcggtggcggcgattcttgctggggcggcggaggggaaggtgaacgggaaggcgaaggggaagtacagggcgctgttcaacttcggggactcgctggccgacgccggcaacctcctcgccaacggcgtcgacttccgcctcgctaccgcccagctcccctacggccagacctttcccggccaccccaccggccgctgttccgactgccgtctcgtcgtcgaccacctcgccgacgagttcggtctgccgctgctgccgccgtccaagcttaagaactccagcttcgctcacg

SEQ ID NO: 42940 - DNA, 421 bp, Oryza sativa
  Clone ID: uC-osroM202028g12b1
ttaagatgaagtgcatcgtttaaagggaatttcagggaagggagaacgtgctaaatggcttaaaaataatggcatccataccgtggcagacttcaaaaaggctttaaacaaggatgaagaaaagatctgcactgagtgtttcaacatgaagaaggacaacatgctttggaaagctactgttgaacatgctgaacagtgtgatctcgaaggcaattacaaactgaaatcatatagagttgaagagaaacatgttacacttttctttaactgtgtacacgacctcgttggagcaaaatttcgtggtcgctatgttgcaaaggacaatttcagttcagatgagaaggatgaagtgaattgtttgaaaatacaagcatacgatgaactggataacattgtctttgatcacgaaatgaaagacaat

SEQ ID NO: 42941 - DNA, 426 bp, Oryza sativa
  Clone ID: uC-osroM202028h04b1
ttctccttgaatcttgcctccaaaaactcttgccacttagcattcacaatgctcaccacatcatcacatagcaggcaccaccatgcatttgagaggagccccaaccacagcatgatgaagaacatagcagacaggaacaagcatgatcttcttcagagtgccatgaaccatgcagcaagcaagtacatgcagaggatctaccctctggggatccagaggagcagctccaacctcacactctcatcactctccctgtcacagaactccaatgattcttcactcagcagctcaaactctagctgggagcccaaggtgcccctgctgtatggtggcacatttagcccctggggtgatgtgcttgtgtccctggagaggaggagggaagaagatgatgacaaggttagtgatcatgatgttgagggggag

SEQ ID NO: 42942 - DNA, 177 bp, Oryza sativa
  Clone ID: uC-osroM202028h05b1
gtcctccgcgctagcgccggggacaggacccgtcgacgaccctccgcgcggactgaagcgagaattttggccgcctggtgagaccgggctacattgcttcaccaacggcttcctcgacctgacgaccggcgtggcatgcccaccgggcatgatgaggacgagctccttcaccgacag

SEQ ID NO: 42943 - DNA, 322 bp, Oryza sativa
  Clone ID: uC-osroM202028h07b1
ttgggtggcgaggaggatggggcacctgccgtccgccctggtcatcaaggtggtgcacgttcgcgcgcgacctcaccagcggcaggctaagcccagtatgcgaccccgagcctatctccacactgcacgcggtggacaaagacgaagaaaaatcagatgatgacacacattctgagcaaaaccctgacacccgccatggccctgacacatcttcctttacagcattcttgatctgattactgtcatcatttggatatagtaatgggttcatggagataattcctgagcagaatggggaattgggatccccaacttgaacacc

SEQ ID NO: 42944 - DNA, 440 bp, Oryza sativa
  Clone ID: uC-osroM202028h10b1
cggccctgcaccgagtgtcccgcgcggtggcggcggggattggccacgcgtcggtccaccgcgcgccgaggtggggcgcggcggcggcggcggcgaggtggctgagcgggggcagggaggcgatgagctacgacgtggtggtcgtgggggctgggcccgcggggctcgccgtggccatccggctgaagcagctctgccgcgacgccgacaccgacctctccgtctgcgtcctcgagaagggctcccaagtcggtgcgcatgtattgtcggggaacgtgttcgagccacgagcgttggatgaactcatcccgaagtggaggcaagaggataccccaataagagtccccgtcttatctgacaagttctggctgttgacaaagaataatgcatggacacttccatcttctttcgatacaagggaaactttgtgataagcttga

SEQ ID NO: 42945 - DNA, 493 bp, Oryza sativa
  Clone ID: uC-osroM202028h11b1
ttcaactgcactacactgcagcacacacaccccgcacccaccaagctaagtaattaatcatcaatggcttccgccgtggtgaagatggccgtcgtctgcctgctcctcctgtccgccggtcatctgatggcctccgccgccgccgcgcgcccggacaccgtcgacgacgcggcggcgctgctgcgcctcaaggaccgcatcgagctgcaggaggaggaggccctggccctcgccgaggagctcgccctcctcgacgacggcgccggcgacgccgtcggagccggctgctcctgcagcaccaccaagtgcaagacgtgcatcgccacctgcgggatcaagtgcttccccaagggaatcaaaggcttccccacctgcttcttcgcctgcgtcttcaccaccagcaagtgcttcgccttcggcgcctaatcgatccatcgatcacgtcgtcggctcggttcgtcatcatcgcgaacgatcggccgtttcacctaat

SEQ ID NO: 42946 - DNA, 363 bp, Oryza sativa
  Clone ID: uC-osroM202028h12b1
attggcgaaaccctagcagcagattgccccgccatgctctgagcccgccgacgatggccgcgccggggccggggtgggtggtgccgtcgccgccgtagccgcagccgcagcagcagcagcaggcggtggtggtggacggccgggacggcctcgtcgcgtggctgcgcggcgagttcgcggctgccaacgccatcatcgaccttctcctcgcccacgcccgctaagccgccgatcccgccgggttcgacgccgttgccgccgccgtccagcgcaggcggcaccactgggcccccgtcctccaccttcagcattacttccccgtcaccgaggtcgccctcgagctttaccacgccgacgtgcgcc

SEQ ID NO: 42947 - DNA, 173 bp, Oryza sativa
  unsure (1)..(173): unsure at all n locations
  Clone ID: uC-osroM202029a02b1
atgcattgcacggaggcgcggcggaagctgttcctcaagagcttcgcgtacgtggtgacggtggggatggtggtggcctacatggtggggctcaacatgtcgtggacggccatcaccacggcgctggcgctggtggtggacnaatttcgtggacgccttaggcggcctggaca

SEQ ID NO: 42948 - DNA, 521 bp, Oryza sativa
  unsure (1)..(521): unsure at all n locations
  Clone ID: uC-osroM202029a08b1
tcataaggatattgctgagtttgcgcttgctatgtgcccagctgagccatatgtgttatctggaggaaaagacaaatctgttgtatggtggagcatccaagaccacatatctgcactgggagattcctcgaaaactgaatcttctccaggggcatcaggaagcaagggaaaaactgcaaatgataaggatagtcctaaagttgatcctcgtggtatctttcttggccacgacagtactgttgaagatgtccagttctgcccttctagtgcacaggagttttgtagtgtaggcgatgattcttgtcttattctttgggatgcccggagtggtacaggcccagctgttaaggttgagaaagctcatggtggtgatgttcattgtgttgactggaacctccatgatgttaactatatcttaactggttctgcggataattctgtccgtatgtgggaccggagaaatctgggttctggaggagcntgcatttcagttcacaaatttgagggtcataaagctgctg

SEQ ID NO: 42949 - DNA, 487 bp, Oryza sativa
  unsure (1)..(487): unsure at all n locations
  Clone ID: uC-osroM202029a09b1
agttcttggctttcttcgccgtactcgtcttagcaacggcggtcgttcctgccgtcagccagcaaggatacctgagcatcgactgcggcctggaggccaacagcagctaccaggacgacaacaggatcttgtacgtgcccgacggtccgtacgtcgacggcggggagaaccacaaggtggcggcggagtacgcgtccagcttccagcgcccagaccagacgctccggagcttcccctccggcgtacggaactgctacacgctccccaccgccgccgggtccaagtacctggtccggctggtgttcgtctacggcaactacgacggcaagaacatctnctcctcctcctcgtccgcggcggcggcggcgctcaggttcgacctgtaccttcggctgagccgttggaccaccgtgcagggcggcacccgcagcggcggcgaggtgcacaggccgtgttcgtggcgtgggccagctgggcgcccgtgtgc

SEQ ID NO: 42950 - DNA, 541 bp, Oryza sativa
  unsure (1)..(541): unsure at all n locations
  Clone ID: uC-osroM202029a10b1
tcgggtgtctcagttcctgcccttgacaaagatgctttgtggcattttaagccagaaaaactaggtgttggagatattatcacgggtggagatctatatgctattgtcaatgaaaatactttgatgcaacacaaggttgctcttccacctggcgctatggggaaaataagttacatcgccccagctggtcaatatagcctgcaggatacagtgctagaattggaatttcagggtatcaaaaaggaatttaccatgctccagacatggcctgtgcgttcaccaaggcctgttatggaaaaacttgctgcagatacacctcttcttacaggacagcgtgtacttgatgcattgttcccctcagttcttggaggaacatgtgccattcctggagctcttggttgtggaaagactgtcattagtcaggcactttccaagtattccaactcccaagctgtggtttatgtcggatgtggcgaaagaggacatgagatggctganggtctcatggactttccccattgacaatgacgacagaggatga

SEQ ID NO: 42951 - DNA, 467 bp, Oryza sativa
  Clone ID: uC-osroM202029a11b1
ttgcttccatctcattctcctaattgtcatcactagcttctagctagcttaattaattaattagccatggcggaggagaagcaccaccaccacctgttccaccacaagaaggacgacgagccggccaccggagtagactcctacggcgagggcgtctacacgtcggagacggtgaccaccgaggtggtcgccggcggccaggacgagtacgagaggtacaagaaggaggagaagcagcacaagcacaagcagcacctcgtcgaggccggcgccctcgccgccggcgccttcgccctgtatgagaagcacgaggcgaagaaggacccggagaacgcgcacaggcacaagatcacggaggagatcgcggccacggcggcggtcggcgccggcggctacgccttccacgagcaccacgagaagaagaaggaccacatgagcgccgaggagtccaccggcgagaagaagca

SEQ ID NO: 42952 - DNA, 166 bp, Oryza sativa
  Clone ID: uC-osroM202029a12b1
gcaggcaccggacccgacacgcactggccgacccacgcggctccttacctcgcattatcctcattgggagaacatgttttaaattcacataatggggcgaaaagcccgcccgagcaaatgaattacgaaccaactgaatcagcaaacttttgccccacctcagccg

SEQ ID NO: 42953 - DNA, 487 bp, Oryza sativa
  Clone ID: uC-osroM202029b03b1
tgcactacctctgccgccgctgcgccggcctccccatcgccgtccccatcatcgccgagatcgacctctacaagttcgatccatggcagcttccccggatggcgctgtacggagagaaggagtggtacttcttctccccgcgagaccgcaagtacccgaacgggtcgcggccgaaccgcgccgccgggtcggggtactggaaggcgaccggcgccgacaagccggtgggctcgccgaagccggtggcgatcaagaaggccctcgtcttctacgccggcaaggcgcccaagggcgagaagaccaactggatcatgcacgagtaccgtctcgccgacgtcgaccgctccgtccgcaagaagaacagcctcaggttggatgattgggtgctgtgccggatttacaacaagaagggcgggctggagaagccgccggccgcggctgtggcggcggcggggatggcgagccacggcggcggcgtccagaggaa

SEQ ID NO: 42954 - DNA, 493 bp, Oryza sativa
  unsure (1)..(493): unsure at all n locations
  Clone ID: uC-osroM202029b04b1
gccgctcccgcctcccccatgagatgacccctcccccgccgccgtcccatgtgctcgccaccgtcgatgcggcggcatccgctgctccctctcctcgccgccgtccttgtcggcgccgccgtccgcgccgggaagatcgccacggaggtggtcgtgccggacttcgtggcgtcgtacctgctgttcattgacacctacggcgtgttcctccagtccggcggcggcggcgcgttccaggccgtcgtgtacaacccggcggggcagcaggaccggtactacctcgccgtggtgcacgcgccgtccaagacctgcgtctgggtcgccaaccgcgacgcgcccatcaccgaccgcgccgcgccgttgcggctcacggcgagggggatctncgccgaggatcccaacgggaccgtcgtgtggtcgacgccggcgttcgcgtcccccgtggcggcgcttcggctcgaccaattcggcaacctcgcgctgttcgatggga

SEQ ID NO: 42955 - DNA, 454 bp, Oryza sativa
  Clone ID: uC-osroM202029b05b1
atcgtgtgcaagctaacaacatcgctaggcaaaaggaagtcgttgctttcgagtttcccacccatggcatcctccgccggcgacccgctcctctccggcgaggccggcgacggccgccgcaggttcgtcccgtccaccatacggctcaagacgtcggtgtggtcggagctgggcggcgcggtgggcgatctgggcacctacatccccatcgtgctggcgctgtcgctcgcgtcccacctcgacctcggcaccacgctcatcttcaccgcgctctacaacttcgccaccgggctcctcttcggcatccccatgcccgtccagcccatgaagtccatcgccgccgtcgcgctctcctccgcgcacctcaccatcccgcagatcatgtccgctggcctcgccgtcgccgccatcctccttttcctcggcgtcaccggcctcatgaccaccctctacc

SEQ ID NO: 42956 - DNA, 448 bp, Oryza sativa
  Clone ID: uC-osroM202029b06b1
atcgtttgcaagctaacaacatcgctaggcaaaaggaagtcgttgctttcgagtttcccacccatggcatcctccgccggcgacccgctcctctccggcgaggccggcgacggccgccgcaggttcgtcccgtccaccatacggctcaagacgtcggtgtggtcggagctgggcggcgcggtgggcgatctgggcacctacatccccatcgtgctggcgctgtcgctcgcgtcccacctcgacctcggcaccacgctcatcttcaccgcgctctacaacttcgccaccgggctcctcttcggcatccccatgcccgtccagcccatgaagtccatcgccgccgtcgcgctctcctccgcgcacctcaccatcccgcagatcatgtccgctggcctcgccgtcgccgccatccttctcttcctcggcgtcaccggcctcatgaccaccc

SEQ ID NO: 42957 - DNA, 280 bp, Oryza sativa
  Clone ID: uC-osroM202029b10b1
cttggccaaagcaagcaaccaagcaaagcttcctcttcttctccaagaactccaagaaccttctccttcatcttctccaccatgattccttccatcgcatgagctccatctccggcgtgtcgatcgagatcaccgttgctgctgccgaggtggagaaggaggtgtttgatcgatcggtcgatggaggcgagctcggcggcgacgccaccggacctgtcgctgcacatcagcttgccgagcagcgcggcggtggcgacgtcggggggagggcgtggcggcg

SEQ ID NO: 42958 - DNA, 572 bp, Oryza sativa
  Clone ID: uC-osroM202029b12b1
tttctttaggcgaggcaagaaaagaagtgaaatctctccgttagacaggaagaggaaaagcaagggggaattggggatggcgtcaaagaggatacagaaggagctcaaggatctgcagaaggatccccctacatcatgcagtgcaggtcctgttggtgaagacatgttccactggcaggcaacgataatgggtccatctgatagcccatatgctggtggagttttcctagttaccatccacttccctcctgattatcccttcaaaccacccaaggtggcgtttcgcaccaaggttttccatccaaacatcaacagcaacgggagcatttgccttgacatccttaaggaccaatggagcccagcactaaccatttccaaggtgttgctgtcaatctgttccctgctgactgatccgaaccctgatgatcctttggtccctgagatcgcccacatgtacaagacagataggcacaagtacgagaacacagcatggaccttgactcagaggtacgccatgtagcacctcagatatcgatggacatgtcgatgttgtacaacattatcaacggtgt

SEQ ID NO: 42959 - DNA, 490 bp, Oryza sativa
  Clone ID: uC-osroM202029c01b1
cttcgtctgattcctcattcctccaaccagtggtgtgtgcttgctgctgctgctgcttcagttctcgagtagtactccagtacagacaaggcgagtggtggtggtgtttgttgccatggagtcgcagcaggagaaggcggtttctgcgccggcggcgaacgggagcggcggcgccggcggcggcgagctgatcgggtacgtcgacgtgcacgtgcagagcgcgcgggacatccagaacatctgcatctaccacaagcaggacgtgtacgcgcggctgtcgctgccgggggagggggcgccggcggcgtcgacgcaggtcatcaacggcggggggcgcaacccggtgttcgaccagtcgctgcgcctgggcgtgcgcgccggggacgtcgacggcgcgctccggtgcgaggtgtggatgctgagctcggtcaagaactacctgcaggaccagctgctggggttcgcgctcgtgccgctcccgacgtcgtcg

SEQ ID NO: 42960 - DNA, 550 bp, Oryza sativa
  Clone ID: uC-osroM202029c02b1
gattgtcaatcagatcgagcagttgttttcttgcaggaaggtgcaacaactcaacaacatttacttgataccggagttgtagttgatgacattgttgccgaagagccttcacactcagaatctccaacttacatcattcacgaaacagctgccttggtagtttcgacagaagttgaaactcagacttgtcaatcaaatatacctatacaacaaaatacaagccaccctgcccaacaaagtccagaaacttcacgacattcaattgcaagtcctgtaggtttagaggcaactcaggaatttcagcctgaaatgcagccatcaacctcaggtcaggatcaatctgaagagctggaacaagaaggtatgtcgagctcagcaattcaagatttacagccagaaatgcaacctccaacttagtgcagggtcagtatccaggagcagtattgtgcattgctgcagcttgagatttgcagcctttaatgcaatcatcaaccccagtgccaaatcaacttgcagaggcaaatcaagaggtatgtgagtgctgagcagc

SEQ ID NO: 42961 - DNA, 443 bp, Oryza sativa
  Clone ID: uC-osroM202029c04b1
ctcccgcgcgccaccgcttcggagaaggccatccggctgctgctcaagtcgccggccgtgtcgccgtcgtcgtcgccgaagaagtcggcctcgccgccgtcgccgccgccgccgcaggaggcgaagaaggagtacccgcctgacctgacgctgcccgacctcaagagcggactgttcagcaccgacgagttccgcatgtacagcttcaaggtgaagccgtgctcccgcgcctactgccatgactggaccgagtgccccttcgtccaccccggcgagaacgcgcgccgccgcgaccctcgccgctactcctacagctgcgtgccttgcccggagttccgcaagggcggctcgtgccgcaagggcgacgcgtgcgagtacgcccatggcgtgctcgaaggctggctccacccggcgcagtacaggacgcgcctctgcaggaccag

SEQ ID NO: 42962 - DNA, 520 bp, Oryza sativa
  Clone ID: uC-osroM202029c06b1
gcaagatctgcagcgacagccatggagatcgagctctcacccgtgctcctcctcctccccttcctcctcctcggcttcctctacctcaccggcggcgtgctccgctccggcgggaacgcgcggcggcgtctcgctccggctcctcggggactgcccgtcatcggcaacctgcaccaggtgggcgcgctgcctcaccgcgccctgcgcgcgctcgccgcggccaccggcgcgcctcacctgctgcgcctccgcctcggccatgtcaccgcgctcgtggcctcgtcgccggccgccgccgccgcggtcatgcgcgagcacgaccacgtgttcgcgacgcggccctacttccgcacggcggagatcctcacctacgggttcaaggacctcgtcttcgcgccctacggcgagcactggcgccacgcccgccgcctctgctccgagcacgtctctcagcgccgccgctcccaccgatacggacccatgagggagcaggaggtcgcgctcctcgtcaacgccatca

SEQ ID NO: 42963 - DNA, 512 bp, Oryza sativa
  unsure (1)..(512): unsure at all n locations
  Clone ID: uC-osroM202029c08b1
agctgatcaagagctcttaattagctagctagtgattagctgcgcttgtgatcgatcgatctcgggtacgtagcaatggcgtccaaggcgttcgctctgttcctggccgtgaacctcgtcgtgctcggggtggcaagcgcctgcggcggcagcccgtcgtgcccgacgccgacgccgtcgaccccgacaccgtcaacgccgacgccgacgccgtcggcgttcgggaggtgcccccgcgacgcgctgaagctgggcgtgtgcgccaacgtgctgggcctgatcaaggccaaggtgggcgtgcctccggcggagccgtgctgcccgctgctggaggggctcgtcgacctcgaggcggcggtgtgcctctgcacggccatcaggggcaacatcctcggaatcaacctcaacctccccatcgacctcagcctcatcctcaactactgcggcaggaccgtccncaccgctttcaagtgctaagcagcgtgcatatgcaatgcctgcatgatttgatc

SEQ ID NO: 42964 - DNA, 531 bp, Oryza sativa
  Clone ID: uC-osroM202029c09b1
cttccttctcctccggctcttcttcagtatcgaatcctctcttctcctcgtgcccaccaccaccaccgtagcaatggcgggcaacgggccgatcaacaaggaggacccgctcaactggggcgcggcggcggccgagatggccggcagccacctcgacgaggtgaagcgcatggtggcgcagttccgcgagccgctggtcaagatccagggcgccaccctccgcgtcggccaggtggccgccgtcgcccaggccaaggacgccgccggcgtcgccgtcgagctcgacgaggaggcccgcccccgcgtcaaggccagcagcgagtggatcctcaactgcatcgcccacggcggcgacatctacggcgtcaccaccggcttcggcggcacctcccaccgccgcaccaaggacggccccgccctccaagtcgagctcctcaggcatctcaacgccggaatcttcggcactggctccgatggccacacgctgccgtcggagacggtgccggcggccatgctcgtgcgcatcaacac

SEQ ID NO: 42965 - DNA, 120 bp, Oryza sativa
  Clone ID: uC-osroM202029c11b1
cttgctttcgccgcagctcctcccttcgtcgtccgtacgacgccggccggccgatgcgccgccggtccaggggcgccgcggggtggtgctgttgtcggtagggagggagtgggggtgggt

SEQ ID NO: 42966 - DNA, 533 bp, Oryza sativa
  Clone ID: uC-osroM202029c12b1
aattaggtttcatgttgctatgccaaagcctcgtgataacaaggagaggcctgcttgcatccctcaggctgttctggatgctcgagcaagtgctgctgctgcaaaggaaaagaagaagctggaaaggaaactggagaaggacctcgagaatgagaatggaggtgctggggtctattctgctagtctcaagaagcattacttattggctgatgatgaatggaaggaagatattctgcctgagatattggatgggcataatgttgccgattttctggatccagatatactgcagaggtgtgaagagttggagagagaggagggtcttcgcctcgaagaggaagctgcacaggaagctctccagattgatggccatgaactaactgaagagcagcgtgaaatcttgggtcagattagaaagaagaaggcattgctcatccaagagcatagaatgaagaagaggactgcagacagccgtcctattgttcctagaaagtttgacaaagacaggacattcacaactaatagaatgggtc

SEQ ID NO: 42967 - DNA, 533 bp, Oryza sativa
  unsure (1)..(533): unsure at all n locations
  Clone ID: uC-osroM202029d02b1
ctccttttctgagtcagattgagacagatggtggcaagtccgtggacctcagcaactatgcttacatattcatgagatggaaagagcagtactttgtcaatgttggagtggactgtgggttgaccatagctggtttctactatgtctgcttttcatgtagcgacggttccattagcgggtattattatgatccaaacagcagtccgtttcagaagcttgaactgaagtgtaccaatgagaaagattctggatttaccttttcgtcctacgagctgcagtgagagactgacaggcctgctgtcattatagtatgtgcggatgttaatatacacaatgtatgtactgaactcataattctgaatggtgtcccattaaaagggctgagatggcatgtttgtaacagtgatttggagcaagatgtattttattctctttgtaatatgaatataagctggtaaactgtctagtttgaactacttgtgtgttctttttgtgctaatcatggcatggntatgtccaaaataatatgacag

SEQ ID NO: 42968 - DNA, 512 bp, Oryza sativa
  Clone ID: uC-osroM202029d06b1
gtcgctgcctcgacctcgccaccgccgcgctccgttccggccgcgctgccctcgacgtcgtcgagctcgtcgtgagggagctggagaactgcccgcactacaacgccggcgtgggctccgtgctcaccgccgacggcaccgtcgagatggaggccgccgtcatggacggcaacaccttgcgctgcggcgccgtctccggactctccaccgtcgtcaacgccgtctccctcgccaggctcgtcatggagaagacgccgcacatctacctcgccttcgatggcgccgaggccttcgccagggagcagggagtggagactaaagatccaagccactttattacggaggcaaacaaagagaggctcagacaagcaaaagaagccaacagggtgcaggtggattacacccaaccaattcccaaggacgacaacagccgggtcggcacggtgggctgcgtggccattgactccgccggcaacctcgcgacggcgacgttcaccggcgggctggtgaac

SEQ ID NO: 42969 - DNA, 555 bp, Oryza sativa
  Clone ID: uC-osroM202029d07b1
tatctgatcaagagctcttaattagctagctagtgattagctgcgcttgtgatcgatcgatctcgggtacgtagcaatggcgtccaaggcgttcgctctgttcctggccgtgaacctcgtcgtgctcggggtggcaagcgcctgcggcggcagcccgtcgtgcccgacgccgacgccgtcgaccccgacaccgtcaacgccgacgccgacgccgtcggcgttcgggaggtgcccccgcgacgcgctgaagctgggcgtgtgcgccaacgtgctgggcctgatcaaggccaaggtgggcgtgcctccggcggagccgtgctgcccgctgctggaggggctcgtcgacctcgaggcggcggtgtgcctctgcacggccatcaggggcaacatcctcggaatcaacctcaacctccccatcgacctcagcctcatcctcaactactggcggcagaccgtccccaccggctttaagtgctaagcagcgtgcatatgcaatgcctgcatgggttgatcctacgtacggtgattagttggccttgacgactcttgatttga

SEQ ID NO: 42970 - DNA, 486 bp, Oryza sativa
  Clone ID: uC-osroM202029d09b1
tgttgacgaacgaacactcggtagcgagcgaagatgggaaagatgacagcgaaggggaggagaagggttcaaagcccagctcctcctcctcggccaacggtggagccgtcccgggagaggccgaggccgaggatgagaggagcacggacatgaagagcaccgccacggcggcgctcagggcgctgagagagatccggagcgggagctcgacggtgagcgtcttctccctgccgcctctgcacggcagcaatgggcaggatgaaccggggaggtgaaaacgagaatgggaaagaaaaggaaatgatcttgacgctgcgttcggtatcgatgtttcgcctgcacttctgctcaaatgctcagtgatcttggcacttggtaggagattgtaactggctatcagttcatgtttcgttttaacttgggtatttttcgtgtaatctgttagtttcccacctgctgtaaaaatgagagggaaaaatagattag

SEQ ID NO: 42971 - DNA, 509 bp, Oryza sativa
  Clone ID: uC-osroM202029d12b1
tttcttgaaaggtgccaaccaaagagcaagttgatgctctatcaaaggaattggctagtcgttcgagtgttccaggtcatgtgtatgaggcaatcgatgctcttcctgtaactgctcatccgatgacccagtttaccacaggagtgatggcacttcaggtggagagtgagtttcaaaaagcctatgacaaaggaatgtcaaaatcaaagttctgggagcctacctatgaagattgcttaaatttgatagctcgccttccagcagtggcttcatatgtttaccggaggatattcaagggagggaaaactatagcagctgataatgcactggattatgcagcaaatttttcacacatgcttgggtttgatgatcccaaaatgcttgagttgatgcgactatatataacaatccacactgatcatgaaggtggaaacgtcagtgctcatactgcacatctggttggaagtgctctgtcagacccttatctttcttttgcagctgcactgaat

SEQ ID NO: 42972 - DNA, 561 bp, Oryza sativa
  unsure (1)..(561): unsure at all n locations
  Clone ID: uC-osroM202029e02b1
cccacacgaaccttgcgaccacggccggccattagtgaagtaggactaagagcctaagacaataagtgatggaatagataagggacaccacgaaactaaggtgaaagcttgagtttctcagtaagataaaaaaataaatgaaggggagacctaaatttagatggactcaaatcatcaatgtcgttaagaaattttttcttacgactaatgactgtatggtaccatatgacccggccggctgctatgcctcttgaccctataagtgttttcttcttaacttgtagatgacgatgatcagtagttgaagtacatcctgctgctcagtggctcgagccattaagatcggagtaactcgcttagatccattggaaaattaanaaagtgaaaacgaagaaaacctaagtgcctaatcagaaattttggaccactaatatacataggaccataatagtaagtagacatataatgaatgtagatgtatataataactaagaggcatcaacactagatagtatctaataacagcctangatgaagatagatgcatcngatgaacgatga

SEQ ID NO: 42973 - DNA, 579 bp, Oryza sativa
  Clone ID: uC-osroM202029e03b1
cttcatatacacatttaccttgtatggagtctctaacagtgataagttgtcaaagcttagtagtgcttctcaattttcccctatatctgaaggaaatacacatttggagttgccctgagcttagatctataaggggaaagcaggatataaaagtcgaaagtaaatatgttgagcgtaataacggcatggctatatcagaatctagcagtgatctcagtgcatctataactatagaagatcaaggaacatggagaagcaaatatctcctgccatgcttagaatacctaagaatagcatattgtgtaagcttggtagaggttcttgctcttccttcatccatgagaactataattatttcagagtgtcctaagcttgaagtcctgtcagggaagcttgataaacttgggcaactagatattcgattttgtgaaaagctgacactagtggagtcatacgaaggatccttctcatcattggaaactgtctccattgtcggctgcgagaacatggcatcgttaccaaataaacattcaaatactccctgtacaaaaggtagtgcatgattgaatcctttctgta

SEQ ID NO: 42974 - DNA, 463 bp, Oryza sativa
  unsure (1)..(463): unsure at all n locations
  Clone ID: uC-osroM202029e04b1
cttctactgcacgccgcaacacaacgcgctcgcctcgcctcgccccgatcggtggtggtgctcgccgtcgccgggcggcgctagggtggccggagaggctccggagagtaggaggaggaggaggagccggagatgagggggtcgaggaggccggtggccgtggtgctgagctgggtgcggaggcagccgcccaaggtcaaggcgttcctcgccgtggtcgccgggatggccgcgctcgtcttcatccgcttcatcgtccacgaccacgacaacctcttagtcgccgccgaggccggccacgcgctcggcctcggagtcctcatctacaagctcaccaaggagaagacctgtgccggactctcactcangtctcaggatttaacagcactatttttggctgttaggctgtactgcagtttctgtatggagtatgacattcataccatacttgatacaggtacac

SEQ ID NO: 42975 - DNA, 562 bp, Oryza sativa
  Clone ID: uC-osroM202029e06b1
gtcgtactgttgaggaatcgctcgctcgctcgctcgctcgccggcggcgcggacgaggagggggcgagatgttcttccacatcgtgctggagcggaacatgcagctgcacccgcggcacttcggcccgcacctccgcgacaagctcgtctccaagctcatcaaggacgtcgagggcacctgcagcgggcggcatgggttcgtggtggcgatcacgggggtggaggatgtcggcaaggggctcatcagggagggcacgggctacgtcaccttcccggtcaagtaccagtgcgtcgtcttccgccccttcaagggcgagatcctggaggccgtcgtcaccatggtcaacaagatggggttcttcgcggaggctgggcctgtgcagatcttcgtgtccaaccatttgattcctgatgatatggagttccaatctggggatgtgccaaattatactacttctgatggatcggtgaaaattcagaaagatagtgaggttcggttgcagactattgggacacgtgttgatgcaccagaaatttcttgcattggcacaatacaagatga

SEQ ID NO: 42976 - DNA, 473 bp, Oryza sativa
  unsure (1)..(473): unsure at all n locations
  Clone ID: uC-osroM202029e07b1
tctctctcttctcttgggacggactagggacgctgctgctgctcctccttgaggcagagctcgcagccttttgcaccctcacctcgcgggctccactcatcacaaaacctcaaatgcgcccgtgctcgtagaatcgattggatcaaaggttgtagcttttttgtatttcaaggtttgggggggtagcgctggcgaggctgatggtccaggacgaaggctcgtcgtcgtcggtgacatcctccccgctccacaacttctccaacatgccgctccacccggccgcggcggcgtcgcccacgccgccatggatggtgcgggagctgcgttccgacgagcgcgggctgtgcctcatccatctcctgctcaactgcgcccgcggcggcggcggccgggcggcttgatgctgcgaacgccgcgctcgagcacatcgcgtcgctggcggcgcccgacggngacgccatgcagcgcgtggc

SEQ ID NO: 42977 - DNA, 199 bp, Oryza sativa
  Clone ID: uC-osroM202029e10b1
gttgagcttgagaatgactttgatagggggagcggcgggctcggtgttgggggcagtaagggggcagcgacaggattcgatgcggccaccaatgcagacatgggtggtggtaccaccgccggaggtgccagcggtgctagcggtgaaggtgccggcagcaccaccaccggcgtaaatgcccgccgcgttggtggtgccg

SEQ ID NO: 42978 - DNA, 458 bp, Oryza sativa
  Clone ID: uC-osroM202029e11b1
tcattagtgacatcaaccatgtagtggtaattacatattgcaccagtgtgcttctcctatcaccaacatctcatctcaagacacacacacacgcagctaaccggacgattgaaatccgatgaaagaagtatcaagaaattcatgaaacttcaaagaattaacatcacaccgtaagtaatttcctaagacaaacacaaggacgcagccaaaaaaaatgaaatgaaggaaaaaaaaaattcaggacctttcatagagttaccgaacgagcaactatgctgagtgatcaacgcttcagctctcgcgggtcgacccggcgggcctgagcggccggtcgtcggcgtcgtccatcgacacgctccgggcggtccgcgcggagcccgcgccgcccagctgctcgatgcgcacgacgatctccggcatcgccggccgctggtccggcacggtcacggtgcagtcca

SEQ ID NO: 42979 - DNA, 564 bp, Oryza sativa
  unsure (1)..(564): unsure at all n locations
  Clone ID: uC-osroM202029f01b1
cctatatcgaaccttgcgaccacggccggccattagtgaagtaggactaagagcctaagacaataagtgatggaatagataagggacaccacgaaactaaggtgaaagcttgagtttctcagtaagataaaaaaataaatgaaggggagacctaaatttagatggactcaaatcatcaatgtcgttaagaaattttttcttacgactaatgactgtatggtaccatatgacccggccggctgctatgcctcttgaccctataagtgttttcttcttaacttgtagatgacgatatcaagtacgttgaagtacatcctgctgctcagtggctcgagccattaagatcggagtaactcgcttagatccattggaaaattcaaaaagtgaaaacgaagaaaacctaagtgcctaatcagaaattttggaccactaatatacataggaccataatagtaagtagacatataatgaatgtagatgtatataataactaagaggcatcaacactagatagtatctaataacagcctangatgaagatagatgcatttgatgaacgatgat

SEQ ID NO: 42980 - DNA, 336 bp, Oryza sativa
  Clone ID: uC-osroM202029f02b1
atcttacccaaagatcaggtcggaggcggaggcaaacacgagaagaagatgccgcggcggcctagcggcggcggtgtatcatgtattaccacagcacctttttgtagacaagaagtaaactacgaaaactactttatttgtcgaattataaagcaccatcataattatgatgtcttatgaaaaactatatattattactatacctaccttagcttgtaatgaagtagagttcttctttaaaagaaaggttataacgagctatgttatgtatattaatgaataggatgatataatgattagcgatctatatgggactcattactcatggtgtatact

SEQ ID NO: 42981 - DNA, 315 bp, Oryza sativa
  unsure (1)..(315): unsure at all n locations
  Clone ID: uC-osroM202029f03b1
cttaatggacagcgtaacaaaacgcgcttgcgtcggctgccccggcacgaaggcgaggctcgacgacgtcgactggtgctagggcagcctgagaggctgcagagagacgctggatgacaccgaccagctgatgatggacccgatgatgctgttgcagctgccctactccgacggttacgaggccatcgacagacgtcttcngcgtcggtgaccccaacagcgcgaacacccacattaacgccagcgtcatcatgtggagctaccacgactacctaatcgacggcgcccttttctgatgtactcttccattgatgc

SEQ ID NO: 42982 - DNA, 544 bp, Oryza sativa
  Clone ID: uC-osroM202029f05b1
ctctgttcatcccctccccagatctccagccccaggagctccggagggttcccaatggcggtgaaggtctatgtcgtgtactactctatgtatggacatgttgctaaactagctgaagagatcaagaagggtgcttcatctattgaaggtgttgaggctaaaatatggcaggttcctgaaactctccatgaggaagtacttggaaagatgggcgcgcctcctaagccagatgtgccaacgatcacaccacaagaacttactgaggctgatggaatcctgtttgggttccctacaaggtttggcatgatggctgcgcagatgaaagcattctttgatgcaaccggtggcctgtggagtgagcagagccttgcaggcaagcccgccggcatcttcttcagcactggtacccagggcggtggtcaggagactacaccgttgacagcaataactcagttgactcaccacggcatggtgttcgtcccgtcgggtacaccttcggtgccaagatgtctacatgggagaagttcacgggggcagcccgtac

SEQ ID NO: 42983 - DNA, 376 bp, Oryza sativa
  Clone ID: uC-osroM202029f06b1
ctctcttcctcttcttcttcttcttccctcttcttgtggtggtgggtttgacccaagaacggaggagggatagggcgggcggcgatgggggcagttcgggggattttggtcgtggcggtggttcttgcggtggcggcgattcttgctggggcggcggaggggaaggtgaacgggaaggcgaaggggaagtacagggcgctgttcaacttcggggactcgctggccgacgccggcaacctcctcgccaacggcgtctacttccggctcgctaccgcccagctgccctacggccagacctttcccggccaccccaccggccgctgtcccgacggccgcctcgtcgtagaccacctcgccgacgagttcggactgccgc

SEQ ID NO: 42984 - DNA, 524 bp, Oryza sativa
  Clone ID: uC-osroM202029f08b1
gtattctccactcgcttgcgtttgccgttgcgtttgcgttttgcgtagcaagggaagggagagagctcgtgcttttggattggccgcgatgagctgcgggggcgccgggcagagcgggtggctgctcgagtacgggctggtggaggaggagatccagggctccgacttcatctacatggtcgacgaccccgcggccgtctccagcgtgctactgggcttcgacgttcccaggaaggaggacggcagcggcggccaggacaactctgcctccaagaaaagatctcgtccagaatcgagcgcaccgccgggcaccaaggcttgccgcgaaaagctccggcgagacaggctcaatgaaaggttcaacgagctcagcgcgatcttggagcccggcaagccgccgagggccgacaaggtctccatcctgagcgacgccgtccgtctcctgagccagctgcgcgccgaggcccagaagctcaagagctcgaacgagtcgctccaggactccatcaagagcctcaaggccg

SEQ ID NO: 42985 - DNA, 334 bp, Oryza sativa
  unsure (1)..(334): unsure at all n locations
  Clone ID: uC-osroM202029f09b1
gttgagcttgagaatgactttgatagggggagcggcgggctcggtgttgggggcagtaagggggcagcgacaggattcgatgcggccaccaatgcagacatgggtggtggtaccaccgccggaggtgccagcggtgctagcggtgaaggtgccgtcagcaccaccaccggcgtaaatgcccgccgcgttggtgttgctcgtcgctntagtcctatggcggctaggtggcggagctccggtgtggtgtggcgtggaatggatgggcagctaacatttgattgagtaaagagatactcagttttccagtcgtttcatttggttattcatgatataa

SEQ ID NO: 42986 - DNA, 495 bp, Oryza sativa
  Clone ID: uC-osroM202029f12b1
tttccatctcattctcctaattgtcatcactagcttctagctagcttaattaattaattagccatggcggaggagaagcaccaccaccacctgttccaccacaagaaggacgacgagccggccaccggagtagactcctacggcgagggcgtctacacgttggagacggtgaccaccgaggtggtcgccggcggccaggacgagtacgagaggtacacgaaggaggagaagcagcacaagcacaagcagcacctcagcgaggccggcgccctcgccgccggcgccttcgccctgtatgagaagcacgaggcgaagaaggacccggagaacgcgcacaggcacatgatcacggaggagatcgcggacacagtggcggtcggcgccggcggctacgccttccacgagcaccacgagatgatgacggaccacacgagcgctcaggagtccatccgcgagaagaagcaccacctcttcggctgatcgacctcatcacaa

SEQ ID NO: 42987 - DNA, 478 bp, Oryza sativa
  Clone ID: uC-osroM202029g01b1
gatagttgcaagagaggagagggtttctgcggcggcgatggcggcggcggcgaacctggaggacgtcccgtccatggatctgatgaacgagctgctacgctcgaggaagtgcaactccaagcccgacaagcgcctcatcctagtaggtccacctggctctggaaagggaacacaatcgcccattattaaggatgagtactgcttatgccatttagctacaggtgatatgttgagagctgctgttgctgctaagactgctttaggaggcaaggcgaaagaagcaatggacaagggagagcttggatctgatgactagggtgttggaattattgatgaagccatgaagaaaccttcatgtcaaaagggcttcattcttgatgggttcccacggacagttgttcaagcacagaagcttgatgaaatgctaggaaagaaaggtacaaaggtcgataaggttcttaactttggcattgatgat

SEQ ID NO: 42988 - DNA, 561 bp, Oryza sativa
  Clone ID: uC-osroM202029g02b1
ctcctgccatcttcagattgcttcgattttctccttttcgagtttttttccccttcgcttgagagctttcgacgagagcgagggagagggagatcatggccggcaagggagacgggccggcgatcggcatcgacctcgggacgacctactcgtgcgtcggcgtgtggcagcacgaccgcgtcgagatcatcgccaacgaccaggggaaccgcaccacgccgtcgtatgtcgcgttcaccgactccgagaggctcatcggcgacgccgccaagaaccaggtcgccatgaaccccatcaacaccgtcttcgatgcgaagcgtctcatcggccggcgtttctctgacacgtcggtgcagagcgacgcgaagctgtggcccgtcaaggtgctacccggccccggcgacaagccgatgatcggcgtgcagtacaagggagaggagaagcagttctccgccgggagatctcgtccatggtgctcaacagatgaggagacgccgagcctatctcgtagcaccgtcagaacgcgtcgtaccgtccggcctacttaacgactcccaggca

SEQ ID NO: 42989 - DNA, 450 bp, Oryza sativa
  Clone ID: uC-osroM202029g03b1
cctttttcctttcctctcgcagccgtcggcggggggagtggttagttggctactggcttgcagagctctcagagagatttaggcaatggcggaatcaggcccatcgattgcgagtgatgtgactgcactgatcggcaatacttccctggtgtacctgaacaaggtggcggatggatgtgaggcccaaatcgctgccaagcttgagatcatggagccctgctccagcgccaaggataggattggctatagcatgattacagatgcagaagagaagggtctcattactccaggaaagagtgctctgattgagcctactagtggaaatactggtattggccttgctttcatggctgctgccaagggctataagctaaatcctgacaatgccagcatccatgagcatggaaaggaggatcattctaagggctttggtgcccagttggtccttac

SEQ ID NO: 42990 - DNA, 433 bp, Oryza sativa
  unsure (1)..(433): unsure at all n locations
  Clone ID: uC-osroM202029g04b1
gaactgaggtaccgttgcacagtttcattagccaaacttaactaacaaacgaaaaaaaggaagcaaacattcaatcaaaattcaaagccatctctacatgacaatatctgatatatgcaattgtacaacagttttgtgccaagtgctaactcactaataatttgttgcctcaggcacaggtaccgcgaggcagagtaaatcagagccctcttgctcctccattgcttctcatctccatccatcgcagctattccaagtccatgatcaaagagcacaacttgggcttcagatttgctgtaccgaacaaggagtaaaccgctcggncgggtagagcagagaaatcgcacggagcgcccacgccggccgccccagcatcggccgccgacccatacggcgacctcggaggcgatgacggcgaccttgacgaccaccc

SEQ ID NO: 42991 - DNA, 570 bp, Oryza sativa
  Clone ID: uC-osroM202029g05b1
gttctttctcaagacgctcaccctcgacggcgtccccggcaagggcaccgtcgtcttcgtcgccaactcgtggatctaccccgccgacaactaccagtacgagcgcgtcttcttcgccaacgatacatatctgcctagcaaaatgcctgcacctttgatcccttaccggcaagaagaactcaacattctacgaggggacggtaaaattggaccatacaaggagcatgaccgtatctaccgttatgattactataacgaccttggccaaccagacaaaggcagtaaactagtacgaccagtcctcggtggcagccaagaactcccctatccccgtcgaggcagaactggccgggccccaacaaagactgacccaaatacagaaagcaggcttactctgctggacttgaacatttatgtcccacgcgacgaacggttcgggcacctcaagatgtcagactctcttgggtactctctcaggctattgctgaggggtgtcgtccaataatatggacctatgtcgatacgacaccaaaggagtttgattcttttacgacatcatggaactctatg

SEQ ID NO: 42992 - DNA, 424 bp, Oryza sativa
  Clone ID: uC-osroM202029g06b1
gttcgtggtgacggccttcttctacgccaccgcgggcgccggcggcgtgccggcgccgttcatggtgcggaaccgggagtcgaactggatggggtacgtggccgtggcgacggacgccggggtggccgcgctgggcaggcgcgacgtggtggtcgcgtggcgcggcaccgtccggcccatggagtggctcaacgacctcgacttcacgctcgtgtccgccgccggagtgctcggcgccggtggccgttcgccggcgccgagggtgcacagggggtggctgtccatctacacggcgagcgacccggcgtccaagtacagcaagctcagcgccagggagcagatttcggatgagatcaagaggctaatggacaagtacaaggacgaggagaccagcatcaccgtcgtcggacatagcctcggagcc

SEQ ID NO: 42993 - DNA, 508 bp, Oryza sativa
  unsure (1)..(508): unsure at all n locations
  Clone ID: uC-osroM202029g07b1
tttttcgaagccgacattttgcaacccaccatcattcagaaacaatgaagctcgcactttttgcacttttgggcatggcatgcacccttcaacttgctaatgcttccaacactttggaatcgaattccgaggtggatgagttcaatgttgctggaagcgacagctttcaagacttcgatgatcaagacatctcgctcgaagagttctgtgagcaagtcttgttcgaaaagcgcggtgatgttgagattcctgagtttttgattgaccaagtgagaaatcttggcaaggacaagaagaaggatgagaagaagaaggatgagaagaaagatgggaagaagaaggacgaaaagaagccgaagcaaacgtcgtcaccctctggtggcggctgagggcagaacaagaagcgaaaccgacgccgaatctaagatctacgcttgtgaagntgagtgtagggaactttgtcacggacgaatgtcttgtgaaattggaagatgtaatcctagactac

SEQ ID NO: 42994 - DNA, 431 bp, Oryza sativa
  Clone ID: uC-osroM202029g08b1
attgacaagattatcaatctgttgattattcactggatagctatcgactagagcgagggatacacggaccatggcttccacaggagactgtcctgcgatcggtactgtagcatactgctacctactcatgatgaaagcggaggaaggatatctgctgcaaggatttccttcattttaagcggactatcccttggaatgtcactgcctgaactgacgcatttcacagaagcatcggttgctgccacaagaaccatgtctccatgaacccgtgtgccagagataaatgctgatgacccctcatgactcagtgtgtatctagtccggggagagctatagactgagacttgccgctttgtatacccatagaggcctcacatgacggtgctcagagacttcaacctccatagtcctgctgggcaaactgctgcctt

SEQ ID NO: 42995 - DNA, 560 bp, Oryza sativa
  Clone ID: uC-osroM202029g10b1
ctttattagcaccaaccccgtctccttcctccattcctccgccgctagaaccttctagaagctctcctcctcctcccatggcggcgacgatcgtgtccgacaaggcgcgccagatcttcgacagcaggggcaaccccaccgtcgaggtcgatgtgtgctgctcagatggaacctttgcaagggctgcagttcccagtggtgcatcaactggtgtctatgaagctctcgaattgagggacggtggatctgattacttgggaaagggtgtttccaaggctgtcgacaatgtgaactcggttattgccccagctctgattggcaaggaccctacgtcacaggctgagcttgataactccatggctcagcagcttgatggaaccaaaaatgagtgggggtggtgcaagcagaagcttggtgctaatgcaatcctggctgtgtcactggccatttgcaaagctggagctatcatcatgaagattcctctgtaccagcacattgccaaccttgctggaaacaagcaactggatctgcctgtacctgcattcaccgtcattaacggg

SEQ ID NO: 42996 - DNA, 532 bp, Oryza sativa
  Clone ID: uC-osroM202029g11b1
cttcgacctccacgccgacgtcgcgctgcgcctgccacctttatcttgaaccgcgacgtcgttgtccgcccctcccgcgccggcgaggcgaccgagccccctcccctccttccctgcctcgtgccactagcgccgcccttcgccgccgccgccgccgccgcccgcgagggagacgcgagaaggatgagggtgaagaggcggtccaagaaccgcaaggtggtcaggttctacgccacctgcttcggcttccgcgagccctacagggtgctcgtcgacggcaccttcgtccaccacctcctcagtcacagcctcctccccgccgacgacgccctccagtccctcctctccgcctccaggccccctcccctcttcacctccaagtgcgtcctcgccgagctcaggcgcctcggcaagtcccacgccgacgccttcgacgccgtcgccctgctcgccacggccaagtgtgagcatgacaaagtagtcagtgcagtggattgtgttctgtcactgataggtgaaaagaatcccgaca

SEQ ID NO: 42997 - DNA, 307 bp, Oryza sativa
  Clone ID: uC-osroM202029g12b1
ttgtttttcaccaccccgtcccaggccctggcccttgtccctggcgccgtcgacagccgcgtcggcggcggcggcggcggctctgcgcgggtgagctttccgctcggccgtgttcagcgcctaggtgcgctggggatgcgtttgcgggcgttggtggttatcgataaggagactcccgagagcgagccgcctccgaccttgctgcggaaggaccggtccggggcggcgtccgggtcggcgcgggagcggttcgaggccattatccgccgcgtgcacggtgaggtgtgcgctgcgctggaggaggtcg

SEQ ID NO: 42998 - DNA, 444 bp, Oryza sativa
  Clone ID: uC-osroM202029h01b1
ctcctgccatcttcagatcgcatcgattttctccttttcgagtttttttccccttcgcttgagagctttcgacgagagcgagggagagggagatcatggccggcaagggagacgggccggcgatcggcatcgacctcgggacgacctactcgtgcgtcggcgtgtggcagcacgaccgcgtcgagatcatcgccaacgaccaggggaaccgcaccacgccgtcgtatgtcgcgttcaccgactccgagaggctcatcggcgacgccgccaagaaccaggtcgccatgaaccccatcaacaccgtcttcgatgcgaagcgtctcatcggccggcgtttctctgacacgtcggtgcagagcgacgcgaagctgtggcccgtcaaggtgctacccggccccggcgacaagccgatgatcggcgtgcagtacaagggagaggagaagc

SEQ ID NO: 42999 - DNA, 65 bp, Oryza sativa
  Clone ID: uC-osroM202029h03b1
ctttataccataccctctgaagccagtcatggcggagcgcgtcttaaagcgacccaccaagcccg

SEQ ID NO: 43000 - DNA, 541 bp, Oryza sativa
  Clone ID: uC-osroM202029h04b1
attagttgcatctgtcaacagaaaccgtagtacaatcattgttccggctggtagttctggtgaagaaggttgggaagcattcaggaatgtattgttggaaataaacaatgaggcttcccgactttatgttctaccaaaccatcctaatcagcaacacttggaacctccagagcgccttcctggactttctgatgatgttggtgctggatttatagctggacatggaagtcaatctgcttctggaccagaggtagatgttgaacgcctggttgatttgcctcctcaggaagaaattagtggcatgggcatgtctaaggtcataagggcagatcaaaagaagttcttctttgaccttggaagcaacaacaggggtcattacctgaggatttctgaggttgctggagctgatcgttcgtcgataatcttgccactctccgggttgaagcaatttcatgaaatggttggccactttgtagatataatgaaggacaggctggaagggattgacggcgcgaacgtgcgcacagtggagtccagtcag

SEQ ID NO: 43001 - DNA, 495 bp, Oryza sativa
  Clone ID: uC-osroM202029h05b1
gttcgtggtgacggccttcttctacgccaccgcgggcgccggcggcgtgccggcgccgttcatggtgcggaaccgggagtcgaactggatggggtacgtggccgtggcgacggacgccggggtggccgcgctgggcaggcgcgacgtggtggtcgcgtggcgcggcaccgtccggcccatggagtggctcaacgacctcgacttcacgctcgtgtccgccgccggagtgctcggcgccggtggccgttcgccggcgccgagggtgcacagggggtggctgtccatctacacggcgagcgacccggcgtccaagtacagcaagctcagcgccagggagcagatttcggatgagatcaagaggctaatggacaagtacaaggacgaggagaccagcatcaccgtcgtcggccatagcctcggagcacgcgtcgcgacccttaacgccgtcgacatcgtcttcaacggccttgatcagcacggcgcctgccccgtcac

SEQ ID NO: 43002 - DNA, 484 bp, Oryza sativa
  Clone ID: uC-osroM202029h07b1
gttggaggtcaccggaggccggccaccgcgcgggggagatccctgcctccccccgcctcctctcccgcgctcgccgagtgcccctgcccggccgctccgcgcctctggacccctccctctatacccgcgtgaatttttagcatgtgacgcggcggggggcgcgcgcgcgggcggcgggaggaggcgccgccgggggaaatcgggcgcgagggcggcggcggcggcggaagcgggattgatccagagattttttttttttggttatttgtttggattggttcggaaaatacttttgagggcgacgcagcctcttcgaaattcgttttttccagattgatactacaaaatggttcgcatgtctggacattttcaaatggctgctgagctgaaacttgatatgatggcaagtcatgcaacaccagatgacctgaccggtgataagggtgctgcacagatcctacacaggcaactatttgatgcacat

SEQ ID NO: 43003 - DNA, 497 bp, Oryza sativa
  Clone ID: uC-osroM202029h10b1
atcgaatcagccactgcacttcttgttcttgttctcttcctcctcccgaatccgatccatccattggccgccgccgccgccgccgcctcgtgcgtcgcgtgttcgtgtccagagacgatgggcagcctcgccgccgagaagaccgtcaccgggtgggccgccagggacgcctccggccacctcaccccctacaactacaccctcaggaagactgggcctgaagatgtggtggtgaaggttttgtattgtggtatctgccatactgacatccaccaggccaagaaccaccttggtgcttccaagtaccccatggtccctggccatgaggtggtcggcgaggtggtggaggtcgggccggaggtgaccaagtacagcgccggcgacgtcgtcggcgtaggcgtcatcgtcggctgctgccgcgagtgccatccgtgcaaggccaatgtggagcagtactgcaacaagaggatttggttctacaacgacgtctacaccga

SEQ ID NO: 43004 - DNA, 497 bp, Oryza sativa
  Clone ID: uC-osroM202029h11b1
gtctggacactttggggatgtttggcattactggactgatgatggccttggatattatgaatttctccagctttctgaggatctgggtgctgccccaatctgggtgttcaacaatggaatcagccataatgatgaagttgatactgctgcgattgctccttttgtaaaagacgtattggacagtctagaatttgcaagggggaatgcagattcaacatggggttctgctagagctgcaatggggcaccccgaaccattccctgtcaaatacgtcgcaattggaaatgaagattgtgggaaaaaattttaccgcggtaattacctcaagttttataatgctataagggaggcctatccagacattcaaatgatttcaaattgtgatgcttcatcaagtccacttgaccatcctgctgatttatatgatttccatgtctatactgattctaagactttgttttcaatgaagaatacatttgatagatcatctcgtaatg

SEQ ID NO: 43005 - DNA, 380 bp, Oryza sativa
  Clone ID: uC-osroM202030a02b1
cttcttccttcactccgctagggttttaccccgcgatggccgccgccgccgccgccgccgcgcggaggctcctctcccgccgcgccacctccttctcggcctccgctctcctccgccgaggcggccccggtgcgccggagtcgctgctgcgccccaccgtcgccgcggtctcgcgcgtcggcttccttcgcgggttcgcgcggcggccgggcggcgatgggtactccccgatgcggaccggtggcggcggaggaggaggcggagaccgcgcgccgacggagatggccccgctgttccccgggtgcgactacgagcactggctcatcgtgatggacaagccaggcggggagggcgccaccaagcagcagatgaatgactgc

SEQ ID NO: 43006 - DNA, 439 bp, Oryza sativa
  Clone ID: uC-osroM202030a03b1
cattcgcaagcagcttcattcattttgagtacagataatactcatgctgttcttgtgcaccactcggaagctgcataatctcttgatttttagcccaacggctttgctaatatatgtgcgtcgcttgcgttgccattaattcttggatgttgttgctactgttgttttggaagcgatagcttggagttgtaaggtgaggtgaggtgcagggtggtcgatcagtaggtggaaaggaggaatcgaggagatggacggcgagattggggaggacatgctcacggagattctggtgaggctgccgtacaagtcgctggcgaggttccagtgcgtggccacgtcgtggcggcgcctcatctccggcgactacctccgccggaggctgccgctcatcaccttcggtgtgctgtaccaggaaggcccgggcggcggcggcggcggc

SEQ ID NO: 43007 - DNA, 450 bp, Oryza sativa
  unsure (1)..(450): unsure at all n locations
  Clone ID: uC-osroM202030a05b1
tttcaccctctccctccgccgtcgccatcgtgccaccgccgcctcctccacctcctccgccaccgccgtcgcatcgccgtctcggaggtcggagctcgtccgcctccgcctcgcgccgtcgccgagcgcagccgtctccgccgagcaacggtgaaggcgggcgcagccttcatcagcgacgaggtcgtagctccgacgaccacgccacaggcggcgcaaagagctgacggcccagatcctggcatcgggagccacgccgctgcgcccgccgatggcgacggcgaggaggaggaggaggccccgtcgccgcgtccgtcctccgccggctgctacaccttcctccgctccgcgtctcgccgcggcgggcactggcgcctcgactcctccgcctccgcgtncgcggcggcgcatgtggtcagggtggaggtggggacgacgaagggagagagg

SEQ ID NO: 43008 - DNA, 382 bp, Oryza sativa
  Clone ID: uC-osroM202030a06b1
tttttggtttccaccctccaccttgtgctcaggctcaggggaggtatgcagatcttcgtcaagaccctgaccggcaagaccatcaccctataggacgagtcctcggacacgatcgacaacgtgaaggccaagatccaggacaaggagggcatccccccggaccagcagcgtctcatcttcgccggcaagcagctggaggacggccgcacccttgccgactacaacattcagaaggaatccacccttcaccttgtgcttaggctcaggggaggtatgcagatcttcgtcaagaccctgactggcaagaccatcacacttgaggttgggtccttggacacgatcgacaatgtgaaggccaagatccaggacaaggagggcatcc

SEQ ID NO: 43009 - DNA, 426 bp, Oryza sativa
  Clone ID: uC-osroM202030a07b1
ttttgattgatccgatctctcgtctcgtctcgtcctccccatcggaaccctagccgcctcccgtgcccgcgcccgcgccgccacatggagccgaagccaagcacgccgacggccgcggcgaccccgcggtttaagctggggaagcagtcgtcgatggcgcccgaccgcggcggtgcgggggagagctcggaggaggggtcgagcgaggcggtcggggtcatgggcttccagctgatgtacatggcccacgagggcgacgtcgaggggatccaggagctcctcgacgccggcgccgaccccaacttccgcgactccgacggccgcacggcgatgcacatcgccgcctgcgaggggcaagccgaggtcgtcgagctgctcctccagcgtgggggggatgccgtcgccgaggaccaggggggcagcacg

SEQ ID NO: 43010 - DNA, 443 bp, Oryza sativa
  Clone ID: uC-osroM202030a08b1
ctttgagatgagccttattatagtctgtagattcgattagagatattctctttatggttatggataataaaacattgatttctagtgataaattcaagaaagcgaggaatgattttttaaaatcaccatcggatttgaatgctcagtatcgttatgcattggctatggtttattcaaaagatagaactcatattgaggaaggtttgaaattgcttaaagatttgtctggtaatgctaattttcctgagatttgtaattgtttatatcatatttgctatggatattttcgagttgagaaatatcacgatgttaagctttatgctgaaaaactttacaaagaatcacctaatttattgatacctgataaggattccatggctgttatcatgcacaaaactcaagcattggtactattatcggatgaatttttacagaaaccccat

SEQ ID NO: 43011 - DNA, 424 bp, Oryza sativa
  Clone ID: uC-osroM202030a09b1
tttgtgttgcagaagggggagggagggctctgaattttcaagaaagggaccatctttctgctgctgctgctgaccgggttggtgcttgctgaatttgaggctaaagaagtcgcaattggaggttttgtaagagggaaacaatggctggcaaggaaatctaccacaagatgaacgacaaggtgaaagatgcttttagttcgtcaggaccagaaacagggaaaggaaaaacaaaattgtcaggcaagcgtgtcaagcatggttaccatcttgtgaagggaaaatcaaatcatccgatggaggactatctagtggcagagtacaggcaagaaggagagcatgatctggggctgtttgcaatatttgatgggcatttgggccacactgttccagacttcctgagcttacatctctttgataatatctt

SEQ ID NO: 43012 - DNA, 343 bp, Oryza sativa
  Clone ID: uC-osroM202030b01b1
cttaattcttgctagctagatccttctcttctctgcactctgctagagcaagctcgatcgatcgatcagtgatatttccccttatccaaatccagcacaaaccaacaatatccatggaggccgtaacagtgcacgccagcttatagtactactcccctacggtggtcgccggcggccgagacgacgccggcagcagcaacagcagcaggagcatgtcccgcctgccatctcgcgtcgccggcgccgtaactcggggcatcgccaccttccactttgccacagtgggcacgatcctgggggcgatcaccggcgggctgatcgggctggccacggagagcggaat

SEQ ID NO: 43013 - DNA, 432 bp, Oryza sativa
  Clone ID: uC-osroM202030b02b1
gttcattgtgagtttcggactggctcggtgggaaataagttgcatggtaattggggaacgaacagctcccacaatgatgttcctgtggtgggaagttcagccgatggtgcagatgatgaagcacctcctggatttgagtctcagcaggaaagtcggcctggacaagcttgtttagaatcgggggtttctccaggattatacttggagaggtatcaacataacttgactatttcatacgggattccaatcgcttttgttgagcattttggaaccccagaagttgaaggagggccatgtcgcaaaaactggaaagtcgcacctggtgtgcctttccagccctttccaccattgccgccctatccaagagggagtccttgtccttccactcagatgtttcagcatgaacacaacagtttgggacattgtggcagg

SEQ ID NO: 43014 - DNA, 428 bp, Oryza sativa
  Clone ID: uC-osroM202030b03b1
gttatttcgtggaatcaagaagagactttagtagcttacgttgctgaggagcctcctcaaccgaagccagaattcaatgattcaggatacaagaaggctggctcgtctgaaaaagactgcaagagctggaagggaaaaggggattgggaagaaacttggggagaaacgtattccaagaaaaggatacctgcattgttcgtggtcaacatttcaagcggtgaagtgcgagctgtgaagggcataccgagaacattaagtgttggccaagtgatttgggctccatcatcatcacatagcctggtttttgtggcgtggtcatctgataatggttaccaaaagacaccaaggaaacttggaattaaatactgctttaacagaccttgggctctgtatgctgttcctgatcctttatggaagaagctgataag

SEQ ID NO: 43015 - DNA, 443 bp, Oryza sativa
  Clone ID: uC-osroM202030b05b1
gtcggatctaattaatttacctcctccacctcctcctcctccccccgatcggatcggcccggctcctcctcctccgccgccgccaccgccgtcgcagataggagaagatggccgcacttgataccttcctctttacctcggagtctgtgaacgagggccaccctgacaagctctgcgaccaagtctcagatgctgtgcttgatgcctgcctcgccgaggaccctgacagcaaggtcgcttgtgagacctgcaccaagacaaacatggtcatggtctttggtgagatcaccaccaaggctaacgttgactatgagaagattgtcagggagacatgccgtaacatcggttttgtgtcagctgatgtcggtctcgatgctgaccactgcaaggtgcttgtgaacatcgagcagcagtcccctgacattgcacagggtgtgcacggc

SEQ ID NO: 43016 - DNA, 431 bp, Oryza sativa
  Clone ID: uC-osroM202030b07b1
tcggtctattgttgccctctctggcggtcacaccctgggaaggtgccacaaggaaagatctggttttgagggaccttggacaagaaaccctctgcagtttgacaactcttacttcacggagcttctgagtggtgacaaggagggccttcttcagcttcctagtgacaaagccctgctgagtgaccctgccttccgcccactcgtcgagaaatatgctgcagatgagaaggctttctttgaagactacaaggaggcccacctcaagctctccgaactggggttcgctgatgcttaagaggtttctagtctactactgctagtacattgcccgtggtactcttgttttgcatctaggctagggccagtgtgaaccagcagactaccactgtgagtcgcctctgtataaaatttgttcggcctatggccattct

SEQ ID NO: 43017 - DNA, 383 bp, Oryza sativa
  Clone ID: uC-osroM202030b08b1
ttggtaaaaccgagttcgccgcccacctcgccgccatggccatggagctcgccgcgctctgcaccgaccccgtcgtgctctccgccgccttcctctgcctcctcctccacctctccctccgctcctaccgaccgccctcccccggcggtggccgccgcctccccccgggacccccgggcctccccgtcctcggcgcgctgccactcgtcggcccggccccgcacgccggcctggcgtcgctggcgcgcaagtacgggcccgtcatgtacctaaagatgggcacctgcggcgtggtggtggcgtcaacgccgtgcgcggcgaggacgttcctgaaggcgctcgacgcccggttcgcgaaccggccggcggtggcgagcgccgtg

SEQ ID NO: 43018 - DNA, 427 bp, Oryza sativa
  Clone ID: uC-osroM202030b09b1
tctctttaaggagagaaatgacaagtgtctggaagaccaaggttctcactggactcaacaagctctttgacaaggatggaaagaaggctgctgctgctgagttcttgaaatcattcaacaaggaggagattggcaaggagattgatgacaagaagacagagcttgagcccaaggttgtggaggttgttgagtcatctcctcctgagattaaggctttgttgaagggaaaaaaaacaggccaccaaatcaaaaagaacggtcctgcaatcacttaagtccttgaggaattggcttagattgatttccccggagccaaggccgggagcgacgcggtggccaagtccggcacgaccccccttttcccggcgaacgcctttatcctggagaaggttgcgcctttcggttcccaagaggagcccaagcccca

SEQ ID NO: 43019 - DNA, 442 bp, Oryza sativa
  Clone ID: uC-osroM202030b10b1
ttgtttgtaggagagaaactcgacatgcgtctggaagaccaaggttctaactgaactcaacaagttcttcgacaaggatggaaagaaggctgctgctgctgagttcttgaaatcattcaacatggaggagattgtcacggagattgatgacaagaagacagagctagagcccaaggttgcggaggttgttgagtcatctcctcctgagattaaggctttgttgaaggacaaaaaaacagccagcaaaatcaagaagaacggtcctgcagtcactaagttccttgaggaattggctaagattgatttccccggagccaagccggtgagcgacgcggtggccaagtccggcacgacgccgctctccccggcgatcgccttcatcctggagaaggtcgcgcctttcgttcccaaggaggagcccaagcccgagccggaggcacag

SEQ ID NO: 43020 - DNA, 436 bp, Oryza sativa
  Clone ID: uC-osroM202030b11b1
tcgattacattcctttgtctacaacaagatcaagaaacccaaaagctaagcattagctcatccatcttaatccatcagagttgattagctagtagttgagagttgattagtagcttgcctttgaacatggaagggggcaagatgagcagcatgggcatggatgctgcttcagcttctgttactgtccctcccatgcagatgcaggcaggtgatcagagcaacaggatcgccatcatcatctctccaagagccgggagctccaagatcctgccattcgagcttgtcaatggtgccgccaatgccggctcgcaacggcacgctgatccagcagaatccactcctgaagctcatcatcatctatggcatccagtagacctcccaaagataaaaccaccagttcctcttgtcaagaaggtgggtgcagagttctttggca

SEQ ID NO: 43021 - DNA, 440 bp, Oryza sativa
  Clone ID: uC-osroM202030b12b1
tcgtttgctttccctcgcaattttctcctcttttttcggccgtctccccgcacaagcgattctctttcgactcatcaactccacgaaagcggaccgggcctatctgcgccgccgccgccgccgcgcgcaagctagattagattcgcggctgatcgctcgtcgtcggagatgatcaggcggggcggcaaggcgcgggggaaggtcgcggaggaggaatggccgagcctggtggatctggtgcttggctggaaactcgaggacgtcatgaacgagaacctctttaaggacaagatgaaaaggataccgtccacattcagcgatctcaagagctacttagagccctacacctatccattgctggaggagacgcggacggagatgtcttttagcatggatgccatatccaccatgccttataccaaaatttcgtggatcgagca

SEQ ID NO: 43022 - DNA, 241 bp, Oryza sativa
  Clone ID: uC-osroM202030c01b1
tttctctccaccaccaccaccttgatcgcatgctgcgtttttggctgcggtgcgcgtgtaggatgcggaggatggacgagcagatgggacgcgtggggttcgactaactggtgctcttgcatcatcagcaggagcagcggatgctgagggagcagcctttggaagaggaggaggaagaggaggtgcggcgcccgatgtccggcgcggtggactgtgggctagccgcgtttcctgtggcggc

SEQ ID NO: 43023 - DNA, 239 bp, Oryza sativa
  Clone ID: uC-osroM202030c02b1
gtttgttatattagatcgagcagatgatttcttgcaggaaggtgcaacaactcaacaacatttactcgataccggagttgcagtcgatgacattgtagccgaagagccttcacactcagaatctccaacttacatgattcacgaaacagctgccttggtagtttcgacagaagttgtaactcagacttgtcaatcaaatatacctatacaacaaaattccaagccagccctggcccaac

SEQ ID NO: 43024 - DNA, 422 bp, Oryza sativa
  Clone ID: uC-osroM202030c06b1
tttccttgcttcttcctcctcccccctccctcttcatcctcaaccaccaccaccaccccgcgcgcgacgccatgctccgccgctagcccacaccctccccccacccaggcgctcggcgaaatgtcccaccgggcgccaatgccggggggctcctcctccctctccgacgccctcgccgccgccgcgctccgcgacaagcccgactcgctcccgccgggccgcctctcccccgtctcccccctcgtccactccaggctccccactcccacctcctcctccggctcctccggctccgctccgccgaggcccgcgcggcgtggtggtggtgactaccacggcgtcggcgaggggttcggcccgctcatctacacgtcgtgctcgacgagcgcgggtggtggtggcggcggtgtcggagcgagcac

SEQ ID NO: 43025 - DNA, 427 bp, Oryza sativa
  Clone ID: uC-osroM202030c07b1
atctttgactacccacgattccagtctcccaccacaggccaaaacactgcaacatttcagacttcacagttcacagtgagttcagaccaagaacacaagaataccaaaaagaacagcaccaagaactctcctccaatccatcacagacatttttcttccctccaagagaggcattgatcatcagagagtagagccagggcgtgtgtgtgtgtgatgagctcagtgctgctgttcttgcttctgctgctgctttctggagtgagcttgagtggctgcataaggcttggcaatggcgggtatgaggagtggaggatgggctcggcgacctacatcaaggagtccctggggcacccgctgaatgatggtggtggagcctgtgggtacggcgacctggacatctttaggtacgggaggtacaccgccggcg

SEQ ID NO: 43026 - DNA, 389 bp, Oryza sativa
  Clone ID: uC-osroM202030c08b1
ctctcctctccgatttactcctctcctttttgccctatcgccttggcgatagggttccgcttcgctgctgcagcagcggcgtttcgcctgtaaatgcttcttgttgttgttggggggaggggtctcttttaggtgattgttcttgttcttcttcttcgacatggtggctttctatggactcggagatggagggtgtctcgtgtcggcgccggcggagctggccgggatgttctgccgcggcggcgtggtggtgcagcagcagcagaggaagcggtcgctggtggccgcgtcggcggtcgccggcggcggactgcgtcgtgagggcggcgaaaaggtataggcagcagcggcagccgccgtcgttcgagcgctccccgacgagtgccttt

SEQ ID NO: 43027 - DNA, 437 bp, Oryza sativa
  Clone ID: uC-osroM202030c11b1
tcgcccaaccctccagaaccttccgcctcccgccggcgccggcgccgccgactcggccgcggaaaccctagcgtgcgctcgcgcccgccctcgctcgccggccacctccggactccgcctcctccgcctgctcctcgtctccggcccctccgccgccgtcgaccggtcagatctcgacgccgtcaagccgcgatggaggactgggattctgaagactttcagcccgcagtgcctagtgcaaaagctgagccgcttaaaagtaagtgggcagatgaagatgtggaagaagatgatgtaaaagaatcatgggaagaagaggaggaggagaaacctaaaccaccacctgtagaaaagactgcaccaaaacctagtgggaaaggtgctgcgaagaaaggaaaacaacaagcatcaactagttctgaagtagttcaagatga

SEQ ID NO: 43028 - DNA, 231 bp, Oryza sativa
  Clone ID: uC-osroM202030c12b1
tctttttatgctccatgtctttacctccaacccctcggttcacaaccaatgctctgctaggatttagcgggctgagatggctgctctagaaggcgagtaccgttgatacgtcaggaggctgttgctggggcacacaggacacggacctcgaggccgagttttgaagcttacggggagaatcttgacatgccagatcatcaactactgggagactgtgaagtcacggaagga

SEQ ID NO: 43029 - DNA, 432 bp, Oryza sativa
  Clone ID: uC-osroM202030d03b1
cttcttttccctctcgccgtgctggtggtgagtgaggcggcgagcggcgagctcctccggtgatccgaggctcgccggccggcgagagcttgcctgtttcgggaggttttcagggtgatctgagagcacagcgagccgatggcggcggccgcgaacggggcggcgtgctgcggtggcgcgacggggccagggtacgcgacgccgctggaggccatggagaagggcccgagggagaagctcctctacgtcacctgcgtctacaacggtactggaattaacaagccggattacctgggtacggtggacgtggaccccaattcccctacatactcccaagtgatccacaggctcccagtcacccatgtcggcgatgagctgcatcactctggatggaacgcttgcagttcttgccatggtgatccatcggctagc

SEQ ID NO: 43030 - DNA, 433 bp, Oryza sativa
  Clone ID: uC-osroM202030d04b1
ttcttcttgcaggtttctctggatgcactttcccttccagtgccaggtaacatgatgaatctctttgctcctcctgcattaagttgtggcatactctttattttaccattttagtttgtaattagctattagtactaccacggaatacggtcaaattattctggaagattagtcaaatgtagtacacctgctgaatcagcatcttggaaccattgattgatcatgctccatccaccgacaccagtaaattaaactagtactaatagcgaaatgcaatatactactataataatattctttgcagctcgattagtctagatcaacttgatgtgataacctaccctcgcactaattacttcaaagatttactgacaagtttgttgcaatgtctgaactggagtgatgttcctgtgtctttcctttgaagaatctg

SEQ ID NO: 43031 - DNA, 432 bp, Oryza sativa
  Clone ID: uC-osroM202030d05b1
ctttttggcggttaacttgcatatcaaacagacgccgcgcgcgcgagcagttcgtcgtcgtcttcgctcgatcgtagtagttgccggccggcatcggcatgggcgacggcggggagaagcaggcggcggcggcggaggggtggcggctgagcgtcaacgacttccagttgccggagcggcccaaggacccgcacttcgtcaagagggtcatcaagcgatgccacggaaagcatcggaaaattgcaaaatactacaagaagcaggaaaatctcctgaaggatttcagcgagatggaaaccatgaatgagattggttccttagatcagaatgctcctactgaggaagagttgaggcaaatggcaaagggcgaacgattggccatcaacctgtcgaatatcatcaatctgattcttttcattgggaaagttcttg

SEQ ID NO: 43032 - DNA, 430 bp, Oryza sativa
  Clone ID: uC-osroM202030d06b1
cgggtaactagagtatgaaacagacggagagcgcgcgagcacttcgtcgtgtacttcgctcgatcggagtagttgccgtgcggaatctgcatgatcgacggaccggagaactaggccgtatgcggcggcatgattggcgagctgagcgttaactacttccaggtgccgtagcggcccaaggaccggtacttcggcaagagggtcatgaagcgatgccacgggacgcatccgaaaattgcataatactacaagaagcaggaaattctcctgaacgatttcagcgagatggaaaccatgaatgagaacggatccttagatcaaaatgcatctactgaggaagagttgacgcaaatggcaaagggcgaacgattggccatcaacctgtcaaatatcatcaatctgatttctttcattgagaaagctcttgcat

SEQ ID NO: 43033 - DNA, 435 bp, Oryza sativa
  Clone ID: uC-osroM202030d07b1
tcggtttatactagcttgcttgttcaattcaatcgagcagtagctaattgcatagtgatcgatcggtctgtatagatggtggtggccggcaagaagcagggacggcattctttttctgcatcatcatcgtcgtcttcgtcttcttcttgttcagtagtgcagctgggtcatcatcagcgcccacagggtgaggaccctctcatcggcatcaaagcagcagcagcaggaggaggaggaataatgagaaagggcccgtggacggagcaggaggacgtgcagttggtttggttcgtgcggctgctgggcgaacggcggtgggatttcttagcaaaggtgtcaggtttgcgcggcggcgggtgatgagcatatgcgtgcgtgcatctaatctatcgattaattgttgatgatgtcgatcagatggatggatgcatgcat

SEQ ID NO: 43034 - DNA, 431 bp, Oryza sativa
  Clone ID: uC-osroM202030d08b1
tcggtttacagtctcagatagctagccaagctgagcaggactaagatcactcgtgaattcggagataccatgggaagtgtaccgaagaaaggagctgcctttgctctggcggtggccattgcgaccatcgtgatggcgaccaccacgacgatggccgccgacctgtcggacgccgagaaggcacagttcgtcaagctccacaacgacgcccgggccgcggtcggcgtcaaggcgcaggtgtcgtggagcgaggcggtggcggcgaaggcccgggagcacgccagcacgtgccggacggaccacatacaggggccctacggcgagaacctgtggtggtgggtggagcagcaccgccggctgggtcgggaagccagcggacgcgatggggagctgggtgggcgagaagccgtactacgatcgcagcagcaaca

SEQ ID NO: 43035 - DNA, 422 bp, Oryza sativa
  Clone ID: uC-osroM202030d09b1
tcgtttcgaacaaaaaaaaacgttgctggaaataatggaggtgaaggtgttgagctctaggctggtcaggccgtcgtacccggcgtcggcggcggcgccggaggaggagttcgtgccgtcgtcgatgttcgacaaggtgacgtacgacatgcagatggccatcatctacgcgttccggccgccggggccctccgtggccgacatcgagaaggggctcgccgcggtgctcggcgtctaccgcctcttcgccggacaggtggtccgcggcggcggcggcgagctgcggggcgtcgtgctgaatgaccatggggccaggctggtcgaggcctgcgtggatggtagcctcgccgacatcgcaccggcgaagccgtcgtcggtggtgctgcggctgcatcccagccttgagggggagatcgaggagg

SEQ ID NO: 43036 - DNA, 431 bp, Oryza sativa
  Clone ID: uC-osroM202030d10b1
tcgctccactctctttgccactgacttcttcgagatcaaggccgtgaaagaaatcgaaccgtcactaaagaagcagctcatcatttctacggctctgatgactgttggtattgcactggtcagttggttggcgctcccatacaaattcaccatcttcaattttggtgaacagaaggaagtcactaactgggggttgttcttgtgtgtttcgatcggtctatgggctggtctgatcatcggatacgtgacagagtactacactagcaatgcatacagccctgttcaggatgtcgcagatgcttgcagaactggtgctgccaccaatgtcatatttgggcttgctctaggatacaagtctgttattatcccaattttcgctatcgcgcttggtatctacgtcagcttcaccattgctgcgatgtacggcatag

SEQ ID NO: 43037 - DNA, 441 bp, Oryza sativa
  Clone ID: uC-osroM202030d11b1
acaagcgtcaaatcgcgttaaagccaaaaacctcatacaagtccaggaatctgtaatatattccgagacttttacacgcattccagtcatcactagtgtagcggttgctgcttcttccccggggaggtttatcggatcttgatggagacccatatcggatccgtggacggggcggcggcggcggcggacaacggcgcggtggggtgcccggcgtcggcggtggggtgcccgatgacctcggcgcgccccgcgcccgtgtcggccggcgaggcgtcgctgggacggcacctggcgaggcggctggtgcaggtgggcgtcagcgacgtgttcgccgtgcccggggacttcaacctcacgctgctcgaccacctgatcgccgagcccgggctgcgcctcgtcggctgctgtaacgagctcaacgccgggtacgcggtcgacggc

SEQ ID NO: 43038 - DNA, 385 bp, Oryza sativa
  Clone ID: uC-osroM202030d12b1
ttgttctttggaaggcactccatgtgccatgtgagggtgttggtgtctctagggtacctgcctcggcaggcaatcacacacacatatttatcacgagaaagagtacagctgcagagaataggaaggatccagacactcaaagagagaggagaggtaggagagatgggaggctatcataggaagctgatgaagagctggaagggtgcagctcataagtatctaggcatggacttcgcgctcggcttattgctcgttttccagacatactttaccgtctccaagcagtgagtgatcgctgcacccaacgcaattcggataacattgccgggacacgcctacctgacgatccacacgtctgtggaagagaagaggccacagctgcccc

SEQ ID NO: 43039 - DNA, 365 bp, Oryza sativa
  Clone ID: uC-osroM202030e01b1
catttttcctctactactagtaatactcttctctcttctcacagggagtgtgtgtgcctccatgacagtgctcgctctccctgagccgagagagtaaaggctctctccttcacacacctaccgcctactctcccactcttcttcccaccccactcgtgtgcgcgccactgccgccggcgatggcgccaatgccggcgccggccgtggctctggcggttctggtgctcctctccgccgttccggggtacttctccgacgacctcaacaccgacgcgcaggcgttgcaggcgctgcggtcggcgtgagggaagtcggcgctgccgtcgtggaacagcagcacgccgacctgcattgggcaggggtga

SEQ ID NO: 43040 - DNA, 442 bp, Oryza sativa
  unsure (1)..(442): unsure at all n locations
  Clone ID: uC-osroM202030e02b1
gtttttcactgctcgtagctgttgagagcggatccatccgcccagcgtccgtccacaagcagcagacggccaccatggctcagcgtatcgctgcactgctttttctggtcagtttcgttgtcgttgctcttgctgacaagcctacagccgaggttgcgaagttcaaggattacaaggagcatgaccaccagcatcaggacaagcactaccaaaaggattacaagcccgagcactatacaaagcccgactacaagcccgactacaagcctgactacaagccaggctacaagcctgactaccatgacatgcccggctatgagcccggctatgagcatgactacaagcactcaccatacggtcatgaatacgaacaccctccttacgggtatcagcccccccacgcgtatgacacatacagtgctccgccttctncatatgatgg

SEQ ID NO: 43041 - DNA, 416 bp, Oryza sativa
  Clone ID: uC-osroM202030e03b1
ccagtgcggtcctttccggcacaaagcacactcgtccgctgacagtgaccagagattctactccagcttgctactcatttttgagggtgccagatcatggatccgacctcagtgccatggagctccatggtgtacggtctcctggggctcgcgcttttgtggcaggtccaccggctgctggtgcggctgtggtggcagccgcggcggctggagcgggcgctgcgggcgcagggcgtccgtggcacgtactaccgcttcctcaccggcgacctcaaggactacggccggctgagcaaggaggcatgggcgagggcgctgccgctgcggtgccacgacatcgcgccgcgcgtggcgccgatcgtgcaccggaccatcgcggagcacggcaaggcgtgcctcttctgggtcggccccat

SEQ ID NO: 43042 - DNA, 424 bp, Oryza sativa
  Clone ID: uC-osroM202030e04b1
ttcttattttgggacaaacgaaaggatcccaaaatgatcttattatgggacggaggaagtattgaattatgcttagtgtgctgacccatatgaagtgatattttcaaagcatgtctagtttaacatatattattttatcatgtctcatgtttatgcataattatcggatgtgacctctctattcacccaatcaacaactcaagatattgggtcggttggagctgtttgttacagatggggttcctggtttcattttagtggcaaaaatagtaaggtcttaaatagcttatttggttcaactggaataagtagctaccttagttggttaccagacagatgaagcacacatttttagaaactttaagctggtggagcaagccagcagctgtatacttctatgctgtcagttcacgccaaaacagtc

SEQ ID NO: 43043 - DNA, 430 bp, Oryza sativa
  Clone ID: uC-osroM202030e05b1
ttttcttaaaagcaaagcgagcctaagctcgcttcgtctctctctcggattcgatcatggcgcagagggagaagaaggtggaggagccgacggagctgtgggcgccggagatgacgctctgcgccaacagctgcaggttcccgggcaacccggcgaccaacaacctctgtcagaactgcttcttggctgcctaggcgtcttcttcttcttcttccgccgctgcctcgccgtcgacgacgtcgttgccggtgtttccggtggtggagaagccgaggcaggccgtacaggcgcaggcggcggcggcggaggcgctggcggttgagcggccgacagctgggccggtggagtagtcgtcgaaggcgtcgaggtcgacgtcggtcaaccgatgccacaggtgccggaggcggttgggcctgaccgggttccggag

SEQ ID NO: 43044 - DNA, 415 bp, Oryza sativa
  Clone ID: uC-osroM202030e11b1
ttcgtttaattaccaaacactctcatcgatcgatctcgcggattaattaaagtggtattagcgagcttaaacgcgccgctaatggcggcgatttacctgctgatcgccgcgctgatcgcctcctcccatgcactcgccgcgcatggcgccggcggcggcgttccgttggcggcggcggcgcctctcccgttccccggcgacctcgccgcgtccggcaagctccggaccgacccgaacgccaccgtgccggcgtcgatggacttcggcaacatcacggtggcgctgccggcggtcgtgctgttcccgggctcccccggcgacgtggcggagctcctgcgcgccgtctacgccgtcccggggcggccgttcaccgtctcgttccgcggtcgcggtcactccaccatgggccaggccc

SEQ ID NO: 43045 - DNA, 440 bp, Oryza sativa
  Clone ID: uC-osroM202030f01b1
cttctttccagcagcattcagcttcccttcctctccccctctctttgttctcctctagctcatccccatacccaaacctccatcagatcacaacttcgctagctaactagagagcaaaggccgggcagtgcaggggggaaaaaggaagagagccaaatgggcaacatgctgccgtgcttggtccaaggcaggacgaccctcccggccgccatgaaccccaagcagaggctctactccctcaagctcctcgtcaaggccctccacaagctgaagaagaagatgatgatgaagcctaacaagggcaagaagatcggtagcagcaaaccgtcatcgccggcggcgccggcggaagcagcttcagccacagcggcggcggtggcaggaggaggcgtagaggcggcgatcgggagcagtaagcccaaggtgagcccgcgaagagc

SEQ ID NO: 43046 - DNA, 427 bp, Oryza sativa
  Clone ID: uC-osroM202030f04b1
gtttgtattgtagattgacaatggcctcttgtctgtcagtcctgttgctcttgtgtctagcacttgcaggttcagtctccgggcaacaactgtcggctacattctattcgaggtcgtgcccgagagctctggccatcatcagggccggcgtgagagctgcggtggcgcaggagcctcgcatgggggcgtcactgctcaggcttcacttccatgactgctttgtccaagcaagtcgtgcatttccacactacttgacttacatttttatatccatcagtcaattacattgtggtcgcagcctttgcagtttcagttctttacactctttcagtctctcttccagtttaatgtgctgcgtcagaacagaatggactcgtagcactgtgttgacgttggattagagagactatggccaccgaatttgctc

SEQ ID NO: 43047 - DNA, 415 bp, Oryza sativa
  Clone ID: uC-osroM202030f05b1
gagttagagtgagacgtgactgttgacgttttttttttatcaacgcaagatcaccggacgatttacggtgcaatcaattacaccgcaaaacagtgacatggagctcaacaaggcggtggccgtggcggcggcggcgatggtcgccgtggtggcaatggtggcggcgccggcgtcggggcaggcggtggcggcgtcgtgcacggcgtcgctgatcaccagcttcacgccgtgcttcaacttcatcaccagcagcagcggcggcggcggcggcaacggcacggccgccggcggcggcgcgccgacggcggagtgctgccagtcggtggcggcgatgatcaacacgagcgccagctgcgcctgcctcgtgctcaccggcaacgtgcccctcggcatccccatcaaccggacgctagcc

SEQ ID NO: 43048 - DNA, 430 bp, Oryza sativa
  Clone ID: uC-osroM202030f06b1
gttcgtgttgccctttttttttttttttttgctacaaacaaatgaaatcatttagtccattgaagagtggcttgtcaacatacttacaccaaactgactggatacagctgaacaactagatcagttattctgggtttctaagcgaacttcttgtcgaggtgacggtctatgatttcagatacggtttctaagaagattacttcacttgaccctgggagaacatggccctcggcttcctggacgatgtcctcaatctcagagtctctattcacagtttccctgcacagtatacgcccgatgtcatacggtgtgaggcctcgtgctgcacctttctttaaaagcatggtgctgatgcacaggacacgagcacatcttgcagacagctcccacccatggaacttgagaagcttgatgtcctcttcagcgtcta

SEQ ID NO: 43049 - DNA, 444 bp, Oryza sativa
  Clone ID: uC-osroM202030f07b1
cttttctcaccctcatactcaggtattgttgccgattgttctgtctccgctcgtcgccggcccctcgtagcgcaaatcgtcatcctgcatcgtcgattgcccacgcctcgatctcccgttggtcttcccgccgttcgccattgaccatcgcccatggctcctccaagagtcaccggcgaatccaccccacgcacccgcgccacctcccacccgcaccctcgcccccgcccactccctcgctctccaaaccctaaccctaacctcccctcctctctccacgactccccgccgcacgccgacagttcgtcgccgggcgccggacccgcactcccctccccgctcaccggtttcctcatcacgccttcgtgccgacaccactccgatccccatctcgcgagcagagcacgggagggatctactacgcggacgctgccgaccggcacc

SEQ ID NO: 43050 - DNA, 360 bp, Oryza sativa
  Clone ID: uC-osroM202030f08b1
tttcatctttcttccaacctgaaatgtcagtcaggtctggtgaaccattcttccttcctcatcacctcatctactaaacacaaaagaacacaagctccagataattatatgcaactatccttcactccaagtactcactcaagaacacaagctcagacagtttgtgtgtcagtgaggcaaggaggaagaagaagaggagccaagaattgcggcggtggcggcggcggcgagaggaggaaggagatgaaggggatgtccgggccgaagctgctcgtcgtgcacccggcgtcgaaggggtacaacggcgtgtgtccgctgtccggcgcggcgtcgtcggggccgccggcggcgtccaatgcc

SEQ ID NO: 43051 - DNA, 274 bp, Oryza sativa
  Clone ID: uC-osroM202030f09b1
gttgctcctgagatcgtctcgtctcgtggtggtggtggtggccattgccggagcttccaaggtgtttgatgtcgatggcggaggtgtgctgtgattctgcggtggtggtcggggcggaggcggaggcgagggcgagggcgcgcgccgggaggcggcggcgggcgggagttgagggggcagggaggtggaacgccacggcgacggctgcgggtgtggcggcggaggaggccgcgacgaggaagcggagggcgagtggtggtgaggccgggttggt

SEQ ID NO: 43052 - DNA, 347 bp, Oryza sativa
  unsure (1)..(347): unsure at all n locations
  Clone ID: uC-osroM202030g02b1
aatcatatagagcacaaggtcaaatctttagccaccaagatcccatcagccacaaatcgatccatctccaagctcaaaatcccaattctttccaagaaagatttttctcggaggccatgtcgaccgccggcggcggnggnggtggtcggggggtcaccatcaggtccatctactgcaggggcgtcaaggcgttagttcccttccagaagccgtcgctctacgccggcgtgtcggtcgccggtcggcgggagaagacgagcggagacccccacggacgggagaaacccgactgggacgccgacgtctttcactttgaccttcctcgtcggcgacgatggtatgctgca

SEQ ID NO: 43053 - DNA, 425 bp, Oryza sativa
  Clone ID: uC-osroM202030g04b1
gttcctgaaattgagtcatggctgccaagctagctcgcctccacagtctccgcgaacgcctcggtgccaccttctcgtctcatcccaatgagttgattgcactcttctctaggtatgttaaccagggaaagggaatgctccagcgtcaccagctgcttgcggagttcgatgccttgatcgaagctgacaaagagaaatatgctccctttgaagacattctccgggctgctcaggaagccattgtgctgccgccctgggttgcactggccatcaggccaaggcctggtgtctgggactacattcgggtgaatgtaagtgagttggcagtggaagagctgagtgtttctgagtacttggcattcaaggaacagcttgttgatggacacaccaacagcaactttgttcttgagcttgattttgagccc

SEQ ID NO: 43054 - DNA, 355 bp, Oryza sativa
  Clone ID: uC-osroM202030g05b1
gttcgtattaccactcattttgcttactacttgatctgagccgcttagctcggtaagaagtaggtgagtagccttcatggagacggaggcctcgccgccgtcgccgatgagctcgctgcgtgacaggctgagggccacggtgtgctgctgcttcggctacggcggcggcggcggcggaggtggcctcggcgacacggtggcgcagtggcgccgccgcgtcggctcgccgggggagatccggtatgatcccctcagctacgcgctcaacttcgacgagggcgccgccgacgacgaagacgacgactacgaggccggcgacaaccaccgtgccgacggccttctctaccggagcttc

SEQ ID NO: 43055 - DNA, 425 bp, Oryza sativa
  Clone ID: uC-osroM202030g06b1
tttatcccgcgctccgctcgctctccaccgctcgccgcgcacgcctcaccggagaccagcccgacggcggcggcggcggcgtcggcggcagcagcgggagcttggactgagatgaggacgaggagtggatctctctaccgcagcggcggcggcggcggggagacggccatggttgggcagaagaggaagaggtcgtcgttgccgccgcagtacgccaccgccggtgactgctgcggcggaggaggccgccggaagaggctggccggtggtggcccggattacctcgacgagctccccgacgacctcgtcctcgccgtgctctccaagctcgccgcctccgcctcctccccttccgacctcctttccgttcacctcacgtgcaagaggctgaatgggctggggcgccatgacatggtcttcggaaa

SEQ ID NO: 43056 - DNA, 421 bp, Oryza sativa
  Clone ID: uC-osroM202030g09b1
gttcgcgtgggtgaaggtccccgcgggatcgttcgcgttcgacgccgccaccggcgccggcacggtggtggactccggcacggtgatcacgcggtggacggcgccggtgtacgcggtgctgcgggaggagttccggcggcaggtagcggcgccgagcgggtacacgtcgctgggcgcgttcgacacgtgcttcaacaccgacgaggtggccgccggcggagcccccgcggtgacggtgcacatggacggctgcgtggacctggcgctgccgatggagaacacgcttatgcacaggagtgccacgccgctggcctgcctcgccatggccgatgcgccgcataacgtcaactgccgtgtcaacgtcattgccaacctgcagcagcagaacatccgggtcgtttttgacgttgtcaactcccgt

SEQ ID NO: 43057 - DNA, 430 bp, Oryza sativa
  Clone ID: uC-osroM202030g10b1
ttggtttcacaccactactctcacaacaatggcgaggagcgtagccgtggtggtgttgctggcgatggcggcggtggcggcggcgcaggcgccgggtcccgctgcgacgccggcggcgggcgccacggggccgccgaacgtgacggcggtcctggagaagggagggcagtacacgacgttcatccggctgatgaaggagacgcagcaggacacgcagctgaacagccagctgaacaactccttcaacggcaacggctacaccgtgttcgcgcctaccgacaacgccttcaacaacctcaagccgggcaccctcaacagcctgacgcagcagcagcaggtggcgctcgttcagggccacgttctcccgcagttctactccatggactccttccagacggccagcaaccccgtccgcacccaggcgttcggc

SEQ ID NO: 43058 - DNA, 427 bp, Oryza sativa
  Clone ID: uC-osroM202030g12b1
tcgctctctcgcgccgccgccgccgccgagcgcctggagcagcgtcagccatggccgtaggtaagaacaagcgcatctccaaggggaagaagggatccaagaagaagaccgtcgatccctttgctaagaaggactggtatgatatcaaggccccgtcggtgttcaatgtgcggaacatcggcaagaccctcgtgtccaggacacagggtacaaagattgcttctgagggcctaaagcatagagtgtttgaggtctccttagctgatctccagaacgatgaggatcaggcgtacaggaagatcagacttcgtgctgaggatgtgcaagggaagaacgtgctcaccaacttttggggcatgtcgtttactaccgataagctcagatcacttgttaagaagtggcagacactgattgaggctcatgtgga

SEQ ID NO: 43059 - DNA, 452 bp, Oryza sativa
  Clone ID: uC-osroM202030h02b1
atttatgtctgttggtagcaaagagggcaatgctgcttccagtttaacatgcaagttgtgccttcagaagcgtagtcttatgcttacaaattacaatacaaacgcaagtttcatcctacctcaacagaagagtaatgtccatcacgcagtggcagctcccaaaataatctttaaggttggttcttcccattccgctgaaccagccacaaaggttgaagctccgccaatcgtgaaggtagaagcccagccagtggtcaagaaggaaacctggccagttgtgaagatggaaacccagccaactgcaaatgtagaagcacagccaactgcaaaagtggaagcctttccaatttcgaatttggcaactcagaataatgcaggggcgcaagtccagcctaagacaaaatctaaaaaacccaagccagaaaaaccgagaaaatccaagaagactgaag

SEQ ID NO: 43060 - DNA, 437 bp, Oryza sativa
  Clone ID: uC-osroM202030h03b1
gtctcttttaaccgcataatatggagtcctgatggaaccttgtttggtgttgcttattcaaggcatattgtacagatctattcataccatggcggtgatgatatcaggcagcacttggagattgatgcgcatgtcggtggtgtaaatgacattgcatttgcccatccaaataagcagctatgtataataacctgcggagatgacaagacaattaaggtctgggaggccactagtggagcaaagcaatttacatttgaaggtcatgaagctcctgtttactctgtttgtccacattataaggaaaatattcagttcatcttctcaactgctttggatggaaagataaaggcttggctatatgataatttgggatccagaggtgactatgatgcgccaggacattggtgcacaacaatggcatatagtgcagatggttc

SEQ ID NO: 43061 - DNA, 427 bp, Oryza sativa
  Clone ID: uC-osroM202030h04b1
attgcatcctctgcaaacaatttgtagaattgcagtgttctctgattgaatcatgcatctaccttgtgcaattctttttataaagcaaccaggaatactgatgactttatttagattgaacattttacggtacgggtgcacagtagtgggaagcaacaaagagtgcaattgatcagctaaccaatccactcggaaatcctattcctgtgccagctctaattagctgtgtataaggtcaaaacgatgttggcactgtgccttctgcactattggtgttggaaattggccttttgtgcttagcctggctctttgcttggttattcagctagtgttttatcataataaatgtaacactggatggcatcgttgtatcgatttccagttattgtactgatttaagtgttaagttgtcatgttgttacataca

SEQ ID NO: 43062 - DNA, 289 bp, Oryza sativa
  Clone ID: uC-osroM202030h07b1
tcctatccagcagaatctagttagttaattaaggagtagtgtgctaactacgacttggaagaagaagaagaagaagaagaagaagaagaagaagcagcagctgagctcgatcagctcgtcaatggcgatgaagaagccagatcagccagctcttgatcttcccagtagcctctccactgtctcctactgctgcggggcgtgcgggtacgacctgaagctgagctcgtcggcgagggacacggcggggatggtcgtcgcctgcggcggcgggggataccggaggcggcgg

SEQ ID NO: 43063 - DNA, 452 bp, Oryza sativa
  Clone ID: uC-osroM202030h08b1
ttgttcccaacacattgtttatagacaaattaaagcagaaactcgaagaaggtacttctctgagaaaattttttaaacaggtattctactttgtattaattacttttaatgttcctttcagcaatggccagataaagcagattttaacaaagcaatgacaaatttcgttcagtctttagccgcttactcattagtatgttattttttacagataaaagacaggtatgtatttttaattattaaccctattgacttatttagacacaatggtaatataatgatagattcttatggcaatttgttacatatagattttggatatttattgtcaagaactgttgagtttgaaaaggctcctttcaaactcacagaagaaattattgatgtattaggaggagaaaagtccaagttatttgcaaaatatgaagaattatgtgttcagggtttttcgc

SEQ ID NO: 43064 - DNA, 427 bp, Oryza sativa
  Clone ID: uC-osroM202030h10b1
gtttgtccgtcaaagtgttggcagcacaccttgtctgctgggaaaagcagttgacattacctatatccgtggtccaaattatttagaaatagatgtggacatcggttcatctacggttgcaaatggagtcttggggctagtgtgtggtgtgatcacgacactagttgttgacatggcttttcttgtccagggaaatacatatgaggagctcccagaacgactgatcggtgcagttcgtgtttcgcacattgaactgaaatccgcaatagttcctgtccttggggattaacaaacttactactgctgcctactgcactgatgatcgcaacgttgggcaccatctacttgactcctgacagcatacaacaatacaacacatgtgtacagagatagaggaaccaactaccggcgctcatgtcatgtcaaa

SEQ ID NO: 43065 - DNA, 439 bp, Oryza sativa
  Clone ID: uC-osroM202030h11b1
ctcgatcagaaatatttttacacagcctaataaacccctcgagaagacaagtgtaatcgccaggggaagcgcgcgagatggacgcagctggcgtcgccgcaaagccgtcgctgtcgaggaagccctcgccgtcgttccgcctccggaacggcagcctgaacgcgctgcggctgcgcagggtgttcgacctgttcgaccgcaacggcgacggcgagatcacgctcgacgagatggcgtccgcgctcgacgcgctcggcctcggcgccgaccgcgcggggctggaggccacggtcgggggctacatccccgcgggcgccgcggggctccgctttggcgacttcgaggcactccaccgcgcgctcggcgacgcgcttttcggccccgtcgaggaggaggagcccgggaagcaaggggaggacgacgaccagggcgacatgaa

SEQ ID NO: 43066 - DNA, 316 bp, Oryza sativa
  Clone ID: uC-osroM202030h12b1
tttgtttaatcccctctcccaagccccaatccgacgcaatccatacgattccccactcccaagccacaattgcaaaccgtcaacgcaagccagagaggcgtatcttttctactcatgttctccgctgagaggccgtgcatctcgagctgccattcgattgatgaggtaaggggggtgccggcgcgagaagcgaggttggctggccggtggagggcgggctgtcggtcgcgggtgcgccaggatggggctgatctcggggatggtgatggggatggtggtcggcgtctcgcttatggccgggtggagccgtgtgatg

SEQ ID NO: 43067 - DNA, 512 bp, Oryza sativa
  Clone ID: uC-osroM202031a01b1
cctttccccgggatctcctcttctattccttttcttccatcgccataagagcagccgcagatcgaattgcattgcagtctttgcagatttcagcttaattgccggacagtgaagtgaaagcatcttcaagggcgtggaagctctctgagattccaaagggtcacaaggcaggggatgagtacaaccaaagtgaagagacgtgtgggaaagtatgagctaggaagaacaatcggagagggcacattcgcgaaggtcaagttcgcgagggataccgagaccggtgatccagtagccatcaagatcctagacaaggagaaagttctcaagcataagatggtcgaacagattaaaagggaaatttcgacgatgaagttgattaagcacccaaatgttgtccgtatatatgaggtgatgggaagcaagacaaatatctacattgttttagaatatgttaccggtggtgagctctttgatacaattgttaaccatggtcgtatgagggaagatgaggc

SEQ ID NO: 43068 - DNA, 454 bp, Oryza sativa
  unsure (1)..(454): unsure at all n locations
  Clone ID: uC-osroM202031a04b1
cgttcatctcttctcttccagcaaggaagcagcagagaagacaatggcagcatcggccatgaagctcgccatggcggtggcgtgcgcgctggcgctcgcgtcggcgtgccacggcctgcagctgggctactacaagcagtcgtgcccccgcgtggaggccatcgtgagggacgaggtgaagaagttcgtctacaaggacgccggcatcggcgccggactcatccgcctcgtcttccacgactgcttcgtcgagggatgtgatggctcggtgctcctggacccaactccggcgaacccgaagccggagaagctcagcccgcccaacatgcccagcctccgcggcttcgaggtgatcgacgccgccaaggacgccgtcgagaaggtctgcccggcgtggtctcgtgcgccgacatcgtcgccttcgccggccgcgacgccgnctactttctcagca

SEQ ID NO: 43069 - DNA, 519 bp, Oryza sativa
  Clone ID: uC-osroM202031a07b1
tttaaagctccccggccggaggaggagcggtcttacgccgccgaggtgcgccgtccggggagccgggaacgtgtcgtcggcggcggtgcgggagatggcggtcgcggaggggcggcggcagcatgagtactccatcgacgcacgcctccggcagctcgcgccggagaaggtgtccgccgacgaccgcctcgtcgactacgagaccctcctcgtcgcgcgcttcctcgacatcctcgaggacctccacggcggcgacttcagacaagtggtggaggattgcctgaggctgtccgaggagtaccagagcgagggcgacccggcgaggctgggcgagctgggcggcctcctgacgagcctggacgtgggcgacgccatcatggtggcgagctccttctcccacatgctcaacctggccaacctcgccgaggagatccagatggtgtaccgcaagaaggcggaggcgagccggcgcggggacttcgtcgacgaggccttcgcgcccaccgagtccgacatcga

SEQ ID NO: 43070 - DNA, 522 bp, Oryza sativa
  Clone ID: uC-osroM202031a08b1
tttagactcagagaggaggcgtgttggttagctcattggcagcagcacacacaaaccacatctcctatatatagctcatttttagcttttggaatttgagagaggttttgagagaaatggctagccaaggtgtagcctccatgttcgctctcgcattgctcctcggtgcctttgcctccattcctcaaaaggcggaggcgatcggggtgtgctacggcatgagcgcgaacaacctgccgccggcgagctcggtggtggggatgtaccgctccaacggcatcacgtcgatgcggctgtacgcgccggaccaggcggcgctgcagtcggtgggcggcacggggatcagcgtcgtcgtcggcgcgcccaacgacgtgctctccaaccttgccgccagccccgccgcggaggcgtcgtgggtgcggaacaacattcaggcctacccgtcggtgtcgttcccgtacgtcgccgtcgggaacgaggtcgccggcagcgccacgtccagtctggtccccgccatggaga

SEQ ID NO: 43071 - DNA, 521 bp, Oryza sativa
  Clone ID: uC-osroM202031a09b1
gtcaaaagcaagagaaagaggggggggttgtgttgtgagcagcgatggcggcgaaacgcgggagcgagtcggacggcgacgagctcggcggcggcggcgccgccgagggaaccagccccaacgacgggggcgcgtctccgcctcccctcgccgccgcgcccgccgtatgcttcatccgctccgccggagacttcgccggtggcgccttcatcggatctatcgtcggatatggacaaggtttgttcactaagaagggatttaagggctcattcagcaccgcagggtcttctgccaagacttttgcagttctctctggcgtccagagtctggttgtgtgcttgttgagaaggctgcgcggcaaagatgacattggtaatgctgggatagctggttggtgcactggccttgctttgagctttccaggaacaccacaagccttgctccaaagctgtgcaacctttgcagcattctcatgcatcatggaggggctcaacaaacagcaggctgcaatggcacagaca

SEQ ID NO: 43072 - DNA, 459 bp, Oryza sativa
  unsure (1)..(459): unsure at all n locations
  Clone ID: uC-osroM202031a10b1
tttgcctcgacgacggctgcgccgactccatctccctcttcatcgacgtcgccggcggcggcaacggcagcggcgtcgccggccatgcccggttcagcgtgctcgaccacgccggctcgccggcgcgccgcaccgacgacgcctcgtcggaggtggtggatttcaggacgcacttctccggccagaggagcctcatcacgagggaggagctcgagaggtcgccggacatcctcagggacgactgcttcgccgtccgctgcgacctcaccgtaatggacgaacacttgctcaccgtcgatctggatcacgaggcggntctcgccgccgatgccgacgccgccgccgtcgtgccgccgtccgacctgcaccggcaccttgccgagttcctctggagcaaggaaggcgccgacgtcggcatcgaggtaggcgacacgacgttccacgcgcaccggtgggtgc

SEQ ID NO: 43073 - DNA, 509 bp, Oryza sativa
  Clone ID: uC-osroM202031b01b1
atgtaagcaagcagccgctcggagcgaagactgaggcggcggcgaccatggcggggctcgcgcacctcgtcctcgccctcctcctccccctcgcgctgctcccgccggccgcgcgcggcacggaggagacgccgcagtacacgacggtgcacgccgagtccgacttcgaggtgcgccgctaccgcgacaccgtctggatgtccgccccctccgacgacatcttcttccacgtcgccaccaagctcggattccaccgattgttccagtacctgatgggcgcgaaccttaactcctccaggatcaggatgacaactcccatcctaactagcatcgtcccaggtgcagggccgctacactcgtctgcctactttgtgcggctctacttaccagcgaagttccaggcttcccctcctgtgcctctccccgaactgaacctccacccggataggtggccaagccactgcattgcagagaggagcttctcgggttatgcacgggacaacaatgtc

SEQ ID NO: 43074 - DNA, 491 bp, Oryza sativa
  Clone ID: uC-osroM202031b08b1
ctttgaggtgggttggtttctcctccccctctttaccttttcctcctcggttcggttccgtggttcgtctagggtttagtgggttgagatggcggcgccggatgtcgagtaccgctgcttcgtcggcggcctcgcctgggccaccgacgaccgctccctcgaggccgccttctccacctacggcgagatcctcgactccaagatcatcaacgacagggagacggggaggtcacgtgggtttggcttcgtcaccttctcctccgagcagtcgatgcgcgacgccatcgagggcatgaacggcaaggagctcgacggccgcaacatcaccgtcaatgaggcccagtcccgccgctccggcggcggaggcgggggctacggcggcggcggtggcggctacggcggcggtcgtggaggcggcggctacggaggaggtggcggcggcggctactggcgccgtgagggcggctacggtggcggcggcggctacggcg

SEQ ID NO: 43075 - DNA, 178 bp, Oryza sativa
  Clone ID: uC-osroM202031b09b1
gtaaaactaaactgatcatacacacaaattaagttgtgatcatccgagcaaaagcaaagcaagagaacggtagctagctagttgacacaatgagggcgggcaggttggtgatcctcgtggcggtggcggtggtggtggtggtcgccggcggcgttgcggacgagggcgccggcgagtg

SEQ ID NO: 43076 - DNA, 537 bp, Oryza sativa
  Clone ID: uC-osroM202031b11b1
ttcaaccacacacgcacgacacgaagaacgccatggcgaagcaggcgtggagctcgctgttcgggtgcttcacctcgcaccacgacggcggcggcaagaggaagaaaggcggcggcggcgggaagaaggcgaagaagaaggtggcggcggcggcgagccagaagcagcggaagctgcagagccggctgtcgttctccgacctgtcgttcggagggatggtgtcgccggaggacctgtcgctgtcgctggccgggtcgaacctccacgtcttcaccatcgccgagctccgcgccgtcaccagggacttctccatgaccaacttcatcggcgagggcggcttcggccctgtctacaagggctacgtcgacgacaagctcaagcccggcctacgcgcgcagcccgtcgccgtcaagctcctcgacctcgagggcacacagggacacaacgagtggctgactgaagtcatctttctggggcaactgaggcatcctcacctcgtcaaactgatcggctactgctacgaggatgaacacagac

SEQ ID NO: 43077 - DNA, 525 bp, Oryza sativa
  Clone ID: uC-osroM202031c02b1
ctccgtctcctcctcatggcgatctcgaaggcttggatctcgctgctgctcgcgctcgccgtggtgctgtcggcgccggcggcgagggcggaggaggcggcggctgcggaggaggggggcgatgcggcggcggaggccgtgctgacgcttgacgcggacggcttcgatgaggccgtcgccaagcacccgttcatggtcgtcgagttctacgccccgtggtgtggacactgcaagaagctcgctccagagtatgagaaagctgcacaagagctaagcaagcacgatccaccgattgttcttgccaaggttgatgccaacgacgagaagaacaagcctcttgctaccaagtatgagatccagggtttcccgacactcaagatattcaggaaccagggcaagaacattcaggaatacaagggcccgagggaggctgagggcattgttgaatacttgaagaagcaggttggtcctgcttccaggagatcaagtcaccagaagacgcaaccaaccttattgatgacaaga

SEQ ID NO: 43078 - DNA, 157 bp, Oryza sativa
  Clone ID: uC-osroM202031c05b1
gaatagaaaaaagaagggagaagagatcacagcagagcacgcacgtagcagcaacacagcaaagcaaaggcattcgatttcagagacgcatcttcgctttttgcctcggcgtcggtgctccacggcggcggcggcggcgggggccaaatcctcgatt

SEQ ID NO: 43079 - DNA, 521 bp, Oryza sativa
  Clone ID: uC-osroM202031c06b1
tcccctccttcctcctttcttttcccctcctctcttcccccctctcacaagagagagagagcgccagactctccccaggtgaggattcagccatgaagggggccaaatccaagggcgccgccaagcccgacgccaagttggctgtgaagagtaagggcgcggagaagcccgccgccaagggcaggaaggggaaggccggcaaggaccccaacaagcccaagagggctccctccgctttcttcgtttttatggaggagttccgtaaggagttcaaggagaagaaccccaagaataaatctgtcgctgctgtaggaaaagcagccggtgataggtggaaatccctgaccgaagcggacaaggctccctatgtagccaaggccaacaagctcaaggccgagtacaacaaggccattgctgcctacaacaagggcgagagcactgccaagaaggcacccgccaagaggaagaggaggacgacgaggaggaatctgacagtccaagccgaggtaatgatgagatga

SEQ ID NO: 43080 - DNA, 470 bp, Oryza sativa
  unsure (1)..(470): unsure at all n locations
  Clone ID: uC-osroM202031c07b1
gtaccaccggcgccaaaccaaccacccaccatccaccggtcgaacacttggcgctctcgcccgccttagctcgctctgctcgtggtgctcgacccgaacaagaacggacatggctcccaggaacgccgccgaggccgtcgccgtcgccgtggcggagggcggaggagccggcatggagcccaggttccgcggcgtgaggaagcgcccgtggggcaggtacgcggcggagatccgcgacccggccaggaaggcgcgggtgtggctcggcaccttcgacaccgccgaggccgcggcgcgcgcctacgacagcgccgcgctccacttccgcgggcccaaggccaagaccaacttccccgtcgccttcgcgcacgcccaccaccacgccccgccgccgncgntgcccaaggcggcggcgctggccgtcgtcagcccgaccagcagcacggtcgagtcgtcctcccgggacacgc

SEQ ID NO: 43081 - DNA, 529 bp, Oryza sativa
  Clone ID: uC-osroM202031c08b1
ttccagctgatcaagagctcttaattagctagctagtgattagctgcgcttgtgatcgatcgatctcgggtacgtagcaatggcgtccaaggcgttcgctctgttcctggccgtgaacctcgtcgtgctcggggtggcaagcgcctgcggcggcagcccgtcgtgcccgacgccgacgccgtcgaccccgacaccgtcaacgccgacgccgacgccgtcggcgttcgggaggtgcccccgcgacgcgctgaagctgggcgtgtgcgccaacgtgctgggcctgatcaaggccaaggtgggcgtgcctccggcggagccgtgctgcccgctgctggaggggctcgtcgacctcgaggcggcggtgtgcctctgcacggccatcaggggcaacatcctcggaatcaacctcaacctccccatcgacctcagcctcatcctcaactactgcggcaagaccgtccccaccggcttcaagtgctaagcagcgtgcatatgcaatgcctgcatgggttgatcctacgtacggtga

SEQ ID NO: 43082 - DNA, 430 bp, Oryza sativa
  Clone ID: uC-osroM202031c09b1
tttctgtcagcacagctggccgaacttgatcttccagctgctgcttgcaccttgacacaacagcatcaggatgcagctctgcaaccaaaacgttgccgccaatgtgcggactgcggcccctcagcgcgctgcaaaggcctcccgcacagcagtgaggcctgtggcagcagctcaagtggaggcagtagcagcagatgcaagcaccagccagcaggcacctctgatgatccgtgctctgcgcggtgatgcagtcgagaggcctcctgtctggatgatgaggcaagctggccgttacatgaaggtgtaccaggacctctgcaagaagcacaccacattcagggagcgctcagagaatgtcgacctggccgttgagatctctctgcagcctttgcatgcgttcagcctgacggtgtgattctgttcagtgaca

SEQ ID NO: 43083 - DNA, 447 bp, Oryza sativa
  unsure (1)..(447): unsure at all n locations
  Clone ID: uC-osroM202031c10b1
ttcttgacaaccttcctctggtcgtcccgatcaggagtttgttggatgatcacgacgcgcccacatcttatcagcttggcgtccatgtcggcatcaagggccagtacgccgggagtaatgaggagaagcacttcatgtacaaccacttatcgtttctggtgaagtaccacagggatgagaacacggatcttgctaggatcgctgggtttgaggtcaaaccattcagtaccaagcatgaatatgatggcgaatggaaagagaatgagacccggctcaagacctgcgatccgcattcgcgacgcctcgtcagggactccgattcggctcaagaagtagaggccggcatagagatcatgttcacctatgatgttaactttgaggagagcgatatcatatgggcgncgtgacgggacagctacctgctgatgacggatgatcagattcact

SEQ ID NO: 43084 - DNA, 504 bp, Oryza sativa
  unsure (1)..(504): unsure at all n locations
  Clone ID: uC-osroM202031c11b1
ctctcactcccaaatcttatcctcaaattcagattcagagtcgtcgaaatcagtagtattcatcaggaatggagcggctgagctcatcggtgcagtcgtgggtggaggaacacaagctcgccagcatcggagggctgtgggcgacggcggtgggcgcatcggtggcgtacgggcggaggaagacgccgcagatgcggctgatccacgccaggcttcacgcgcaggccctcaccctcgccgtcctcggcggcgccgccctcgcgcaccactactacaacccatcatccaagaccaacaacagcagcagcttggactacgacttctactcgcagctgccgccggccaccaccgacgacgggcaggagaacgagaggtggagctggtagtgctacccttccttcctgctgcaagatgcagacaaatgaagatgatgacgatcacgatgatcaattagtaataatctaatcggctccattagntaaatttatctttatcttaataata

SEQ ID NO: 43085 - DNA, 516 bp, Oryza sativa
  unsure (1)..(516): unsure at all n locations
  Clone ID: uC-osroM202031c12b1
gtgacatctacggcgtcaccaccggcttcggcggcacctcccaccgccgcaccaaggacggccccgccctccaagtcgagctcctcaggcatctcaacgccggaatcttcggcactggctccgatggccacacgctgccgtcggagacggtgcgggcggccatgctcgtgcgcatcaacaccctcctccagggctactccggcatccggttcgagatcctcgaggccatcaccaagctgctcaacaccggcgtcacgccgtgcctgccgctccgtggcaccatcaccgcgtccggtgacctggttcccctgtcctacattgccggcctcatcaccggccgccccaacgcgcaggccatctcgcccgacggcaggaacgtggacgccgccgaggcgttcaagctcgccggcatcgagggtggcttcttcacgctgaaccccaaggaaggtctcgccatcgtcaatggcacgtccgtggngtcggcgctcgcggcaccgtgatgttcgacgccaacat

SEQ ID NO: 43086 - DNA, 469 bp, Oryza sativa
  Clone ID: uC-osroM202031d01b1
atttatacctctctgcagtgctgctgctgctagcttgcagaaaaaaaaaactctcatcttttgcaggaagagacatcactgtttctgcattcgtgtgcatttggattaagctttgcttatccctttttagtggagattgttgagtatatcaggtctatatattggcagctctggttggagatagacactcacactgagccaagatggggagtttgcacaagttcagtgttattctcctcatgttatgttttgctacgttggggagcgctcagtatgtcaagtataaggatccgaagcagcccgtctctgttcgtgtcaaggatctgctcggacggatgactctcgctgagaagattggccagatgacccaaatcgagagggagaatgccacggcggagcaaattgccaagtacttcataggtagtgtactgagtggtggaggcagtgtgcctgctcctcaggcatcagc

SEQ ID NO: 43087 - DNA, 507 bp, Oryza sativa
  Clone ID: uC-osroM202031d03b1
gtttgacaagttccctgcaaattccaatcctgcagtagtgggctatccccctgttgcttctagccctagtgattcaatgcaccggatgcagcagccttcagttgctccttcaaagagaaaatcaaattctgttcccaaaactcaaccgcctgtgagtggtgtagggtctccagccagtgtttcaaacatgcatgctgtactgaatgctagcagcccatcaattgggactgcacctatgggtgatcaagcaatccttgagagatttgtcaaaattgatgccatatctcaaaggtgcaagctgcacagcaagaagaacaaagttgacaatatacctcagagaaaaccgattatcaatgcaagccaagagaaagttgctacagttctctccaattgctttcatgctgaagattttagagatgaaataaaacctctttgtaactctatgttgggtggaacaatgaattcctttaagactagaatactaaactttgtggtcaacaaccgcat

SEQ ID NO: 43088 - DNA, 357 bp, Oryza sativa
  Clone ID: uC-osroM202031d05b1
cgcgagtttacggcctttttttttttttctactactaaaaattaaaaagaaataaatgaactagcggtcatcatgtaaaaactccggctgctagacctccatcggcggcggacagttcagatcaagatcaaaagcgatggctttcttcgccaacgcggcgggcggtgatggtgccagatccacgatcgacgaggagtcggagtcgctctgtgccaaggcggccacggtgaccggcgccggcgcaatcttgagcatgcggcaaccagaggcggcggcggcggcggccgcttgtccaaagaagtagtaagggtgcgatacggggtagccctcgaaagggaaacgcatgccgcctgcgcc

SEQ ID NO: 43089 - DNA, 463 bp, Oryza sativa
  Clone ID: uC-osroM202031d06b1
ctttaacatctacgggggggtggtcgaagaggtggctgtccccatggacgcggaggccgccgcgcagttggacccgcacggcgggatgctcgccgcctccggcgctgtccagcccatggcgtccaaccaactcaccctctcgttccagggcgaggtctacgtcttcgactctgtctcccctgacaaggttcaagcagtgctcttgctactcggtggaagggagctgaacccaggtttgggctctggagcatcgtcatctgcgccatacagtaagaggttgaattttccacaccgggtggcatctttgatgcggttcagagaaaagcggaaggagcgcaactttgatagaagatccggttttctgttcggaggaagttgcacttaggatgcagcgcatagaggtcagtttacatcttcaaaaccaagggtgatgaagcaacatcggaattgacagcttcagatg

SEQ ID NO: 43090 - DNA, 461 bp, Oryza sativa
  Clone ID: uC-osroM202031d07b1
tttcttcttcatcttctacctttgatagtttgattgaggtgttgttcctttgagtgcagcaagaagctgatgattttgatgatagcttaaggatcttgccaaactcttgtgttgggagtagttgcttgcagatcgagctgcaaaggtcccattttgcttctccatctgagcttggttaggttgcgtctgagtacacttctgaggcttctttggtcgttttggcctcgagctccgttcttaaactctgcctcgatcgatcgatctcatctcatctgcgctgttcttgttgctgttgctgttcaattttgagaagaaggtgccgatcgagttgagccgatcgggttcagtgaaattcacttgcgtttttgagagaattgtttgagttggttttcgttcttgagatgttcctgagatcgaaggtccaggagatgatcctgaggaggaggttcagatcgatgaac

SEQ ID NO: 43091 - DNA, 430 bp, Oryza sativa
  Clone ID: uC-osroM202031d09b1
ttttgccggcctgcagaatctgaggtgcatgagtgtcacctcttgccctggggtcaccaatctcgcgcttgctgctatcgccaagttctgcccgagcttgaggcagctttccttcaggaagtgtggacacatgacggatgccggtctcaaggctttcacggaatcggcgaggttgttggagagcttgcagcttgaagagtgcaatggggttactcttgttggtattcttgatttcctcgtcaactgcggtccgaagttcaggtccctctctttggtgaagtgcatgggtatcaaggacatctgctctacgcctgcgcagcttcctctgtgcaaatcgcttcaattcctgaccatcaaggactgcccggatttcactgatgcaagcttggctgtggtggggatggtttgcccttacttggagcaggttgat

SEQ ID NO: 43092 - DNA, 500 bp, Oryza sativa
  unsure (1)..(500): unsure at all n locations
  Clone ID: uC-osroM202031d10b1
gtaagtgttagcaggaattgataccaacttcactgttacctcaaaggcgtccgatgaggatggtgactttgctgagctatacgtgttcaagtggaccagtctcctcattcccccgaccaccgtgcttgtcatcaacctggtgggcatggtggcgggtatatcatatgccattaacagcggttaccaatcatggggtcctctctttggaaagctcttcttctccatctgggtgatcctccatctctaccccttcctcaagggtctcatgggcaggcagaaccgcactccgaccatcgtcatcgnctggtcgatccttctcgcgtcgatcttctcccttctgtgggtcaagatcgatcctttcatttcgcctactcagaaagccgtcgccttggggcaatgcggtgtgaactgctgatcnggcaccgtacgaagatgaacttcaatcaatcaaggtctaccccnncttgtgtaaatacctgaggggggctagaatgggatct

SEQ ID NO: 43093 - DNA, 481 bp, Oryza sativa
  Clone ID: uC-osroM202031d11b1
ttatatcttacagatttctataagaattaataaccctggccggagagagagttgatgagagtcgataataatgaaccaacactaagtcccactgcgcaaatcagcgtgtgtgtctattaatgttaatcctccttaatgcacttctactgctttgtggtaaggcaagtaagttgcggtcaacattgatgtatgtgaactttcgcatgtgaatcagtcagtctatatattaagaaaattcgaaccaccgcatagttgaaacatctcgagatctgaagaagcctagggaaactgcagcgacttcgaagtcaactcgcctcagagtatgattaaccatccagatgtgaacttcactcaacagtctatcgcggtctaacaactatatcaaacatccagtctctaacaattctagcatctactacaactcatcactctctctcaaaaaatattcagtaagtcagacgctcagtcaaacaaaggtcac

SEQ ID NO: 43094 - DNA, 469 bp, Oryza sativa
  Clone ID: uC-osroM202031e01b1
gtttggggcaacctcggcggcggcgccgtccagctgctcatgccgctcgtgtacgaggccatccacaagatcggtagcacgccgttcacggcgtggcgcatcgccttcttcatcccgggcctgatgcagacgttctcggccatcgccgtgctggcgttcgggcaggacatgcccggcggcaactacgggaagctccacaagactggcgacatgcacaaggacagcttcggcaacgtgctgcgccacgccctcaccaactaccgcggctggatcctggcgctcacctacggctacagcttcggcgtcgagctcaccatcgacaacgtcgtgcaccagtacttctacgaccgcttcgacgtcaacctccagaccgccgggctcatcgccgccagcttcgggatggccaacatcatctcccgccccggcggcgggctactcttcgactggctctccagccggtacggcatgc

SEQ ID NO: 43095 - DNA, 496 bp, Oryza sativa
  Clone ID: uC-osroM202031e03b1
atttatactgatttatttatatatgtttcaacataatatagcggggatggatcttcctgtatttttcttggattcagcctgtatttgctactatacaaagacattctcatgttaccacagattataatatcatgggatttgtcagtaacaagtgttcttacatgtctgttcaatttgtcataggactttcttggtttggtggagaaattctactacctttctggaagatatgacctggagcttgcagttggtgatgctgcaatggagaattcatttctacgagcccttggccatattgaattggacctgcctgaggccccagaaaaagccccaaagcctccggcccaggctgttgatccattctcaaaatttggtccgaagaaggaaatatcgcacatattccgttcaccagagaagaggccaccccaggaactctcatttgcggttaccggccccacgcttctgcctattggtgggttcttgattggcttatgcg

SEQ ID NO: 43096 - DNA, 529 bp, Oryza sativa
  Clone ID: uC-osroM202031e05b1
gttacaacaaggtttgcccttgagaatcaagctattaatgaagctaccttccgttgccctgatgagctgggatggaaaccacagagggcccctattgtgtcatctgatggaagcatctcaaatttaagaaagaccactgtgcctgtgaatgaagtgaacaagtccctacaacagatgggcttcgatgtggcgccttcggatgacgctggtcgattcgtatgcaactatgtctattaccaatctcttaggttcgcagaacagcgcggtatcaagtctttgttcgtccatttccccctcttcacgacgattagtgaggaagttcagatgaacttcgtcgcaacccttctcgaagttcttgcttcccagaactatgcacagtaacctgatggggggcagggtctacttcctaaggtttcttcttccaattttattaggaagttgccaagtgacaaaacctctctagtgctctgtttgctgtccgactgtaggccgtcgtcgccttttgctgtgaagatgaagtggagtgaat

SEQ ID NO: 43097 - DNA, 501 bp, Oryza sativa
  Clone ID: uC-osroM202031e07b1
ttcagttcttgaatccattcggggtgtaaaaatcatttacagaactaaagaattgaaagagaaacaggacagaagtcgcatttggaatgagacttggctggcaggtttcttttacaaaccgtgcaattatgaactatttgtcaaacagtcgctgaacatggaaatggctatcattatggcaagggatgctggcatggactggatcattcatcttgataccgatgagctaattcatccagctggtgcccgggagtactctctgaggcgattgcttttagatgttcctgataatgttgacatggttatcttccccaactatgagagcagcattgagcgagatgacatcaaagatcctttcacagaggtttccatgtttaagaaaaattatgatcatcttccaaaggatacatattttggcctatacaaagaagcaacgcgtggtaatccaaactattttctcacttaccggtatgggaaatcagcagcaagggttcaggagca

SEQ ID NO: 43098 - DNA, 501 bp, Oryza sativa
  unsure (1)..(501): unsure at all n locations
  Clone ID: uC-osroM202031e08b1
tttagctccgcgacgcggcggcggggcggcgcggcgaggaggtggagatcggcgcccacatgacccgcctcaccggcgacatcatctcccgcaccgagttcaacaccagctacgacactggcaagcgcatcttcctcctcctcgagcacctccagcgcctcacctcccgctccagccgccatctctggatccccggcagccagtatttcccgagcaagtacaggagggagatcaggcggctcaacggcgagctggaggcggtgctgatggagtcgatacggcggagcagggagatcgccgacgaggggagggcggcggtggcgacgtacgggaggggtttgctggctatgcttctgtcggagatggaggagaaggagaagaatggcggcggcggaggcggcgagttcagctacgacgcgcagctggtgatcgacgagtgcangaccttcttcttcggcgccacgagacgtcggcgctgctgctcacgtgggcgatcatgct

SEQ ID NO: 43099 - DNA, 522 bp, Oryza sativa
  Clone ID: uC-osroM202031e10b1
ttcctctccccctcgtcctcctcctcgtctccgccgcgctcctcgcggcggctcccctctcgccggcggccgagaccggtgccgccgcgttcgacgtccgccgccacctctccaccgtcaccaggtacgatgtggcgaggggatccaatagtgtgtcctccgcgccgtctatgtcggatgagtgccgcgtgatccacctcaatctcgtggcaagacatgggactcgcgcacctaccaaaaagagaatcaaagagctggatagactggcggttcggttgaaggctcttatcgatgaagcaaaacaagggcctgaaagtgactccctgaaaaaaattccttcatggatgaaagggtgggagtcaccctggaaaggtagggtgaaaggtggtgagctggtcagtgaaggggaggaagagctatacaaccttgctatcagagtcaaggagaggtttcaaggcctatttgatgaggaatatcaccctgatgtgtattcaataagagcaactcaggttcctcgggcat

SEQ ID NO: 43100 - DNA, 520 bp, Oryza sativa
  Clone ID: uC-osroM202031e12b1
tttagatctggtgcgcggggagcggtggaggctacggcggcggcggcggcgagaccggtagcagtgatggtggagaggacggatccgatggcggtggttctcgtcaaccagttcaaggacgacgacagcagcggctgctgcaacgatggataggctctgggcggctcctccactctcctcccctctctcatatccagtggctcggggtggtggggcgtggccgacgcatccggcggcggagctcggcagaaagaggatggttctagctctccggtggtttaatattgaaacgtacagcccacccaccaccaccccagtcgtccccagctaagcgctcccttgcttgcctcagtagacgagctgccaactagtagcactccagcaagcagcgggtcagcggagtccggagggcgcacgtgcgccgcagcgaggtatcagcatggccaggcggcggctggctggctggccgggttcggcaagcggctaagcaggtgtttaagcgaggaaggatcgatgtccg

SEQ ID NO: 43101 - DNA, 458 bp, Oryza sativa
  Clone ID: uC-osroM202031f01b1
ctatcaatcgccgccgccgtctcctcgtgtaaccctagcttagtggattagtttaagtgtttgccggagattatggggtcggtggcggcggaggaggtggtggtgttccggtcgaagctgccggacatcgagatcgacaacagcatgacgctgcaggagtactgcttcgcgaggatggcggaggtcggggcgcggccgtgcctgatcgacgggcagaccggggagtcgtacacgtacgcggaggtggagtccgcgtcgcggcgcgccgcggcggggctccggcggatgggggtgggcaagggcgacgtggtgatgagccttcttcgcaactgccccgagttcgccttctcctttctcggcgcgggcaggctgggcgccggcaccacgacggcgaacccgttctacacgccgcacgaggtccaccgtcaggctgaggccgcggtcgccagggtgatcgt

SEQ ID NO: 43102 - DNA, 481 bp, Oryza sativa
  Clone ID: uC-osroM202031f02b1
ctttgtccccgttctgggtggtttctgtcatactccaggaactggcttgatctagctctttgcttggtctgaaagtcgatttctgcacaggtactgcgaaagctttgggaatagtattgcagaaagcgcagcaatctgaagcttactgtccaaggtagacagctgacataagcagtttagcacttgagctatgttggattcacttactcgtcttcctgacatattccagtttttcctctcttctttcaagaatcggaattacttcagttgtactaggaattctgaacttcgtttgtagttgctgtctgaatttgtggctactgtttactactggactcatcgtcacgtctctgacaaaactcagtacaccatgttgatgcacgagatgattttgctcctattaaatcttctgtggatttttctctgaaacgtctgactcaagtatgaatgttactaagaagcaacaaccttaaatcagatt

SEQ ID NO: 43103 - DNA, 416 bp, Oryza sativa
  Clone ID: uC-osroM202031f03b1
ctctctcataccttccgctacagaggtatttatagggagagatcggcgccagcatccctgatcatattcagttctgagtttttcttttggcagggagagggacaaagatgagtcttttcggcctcggaagcaagaaccagaagacattcaggccaaagaagaatgcaccatctggcaataagggtgtgcagctgaagaagcacattgatgcaaccttaggaagtggtaatttgagggatgcggtcaggctgcctcctggagaggatctcaatgaatggctagctgttaacactgttgatttcttcaaccaggtgaacatcctttacggcactctgatggagttctgcacgcctactacatgtccaacaatgtcagctggacctaagtttgagtacagatgggctgatggaattcag

SEQ ID NO: 43104 - DNA, 486 bp, Oryza sativa
  unsure (1)..(486): unsure at all n locations
  Clone ID: uC-osroM202031f04b1
ttttaagcaaagcgcaccacgcacacggaaagagaggagaggtcacatcgcggcggcggcggcgaggatgttggcggtgtttgatccgacggtggccaagtgcccggagggcctccggagcccgccggtggccggcggcgccgtggcggccggcggcgcgggcgcgctgatgaagggcttcgccggagcgcacgccgacgcggtcaccgtcagcctgggccccgccggcgccctcgcctactcggcggccaaccagagccccctcgtacccaggttgtttggtgctgtgaatgacatattctgcctgttccaaggacacattgacaacattgccagtctgcagcaacactatggcctgagcaagacagcaactgaggttaccatcctgattgaggcctacaggacccttanggacaggggccctctaccagctagtcatgtcgtgagagatcttatcgggaagttcacgttcatccttgatgacac

SEQ ID NO: 43105 - DNA, 497 bp, Oryza sativa
  Clone ID: uC-osroM202031f05b1
ttcgtgccgcacgaccgcgacttcgacaaggatcccgtcctcgtcgggggcgccgctaaggattggaataaatgttctgtaggatgtgaatttgggttttcagctactaagacgcctgatgctacttttggaattgccccagatcctactgtagagagtatcctcagatcgatggagtcatctcagtattattcagagaacaacattgctgtggctcgagggagaggttacaaaattgtgatgacaacaagcctttcctcagatgtacctgttggctacttttcatgggctgaatatgatataatggcacctgtgcctccaaaaactgaagaagccctagctgcagcatttatttcaaactgtggtgcacgtaattttcgtttgcaagcccttgagatgcttgagagcttagatgtcaaaattgattcatatggtagttgccatcgtaatcatgatggcaaagttgataaagtggaaactttgaagcgctacaaatt

SEQ ID NO: 43106 - DNA, 500 bp, Oryza sativa
  Clone ID: uC-osroM202031f06b1
tttctaaaagccaaagcggacctaagctggctacgtctttctctcggattcgatcatggtgcagagggagaagaaggtggaggagccgacggagctgacgtcgccggagatgacgctctgcgccaacagctgcgggttcccgggcaacccggcgaccaacaacctctgccagaactgcttcttggctgcctcggcgtcttcttcttcttcttccgccgctgcctcgccgtcgacgacgtcgttgccggtgtttccggtggtggagaagccgaggcaggccgtacagtcgtcggcggcgtctgcggtggcgctggtggttgagcggccgacggctgggccggtggagtcgtcgtcgaaggcgtcgaggccgttgtcggtcaaccgatgccacagctgccggaggcgggtgggcctgaccgggttccggtgccgctgcggtgagctctactgcggtgcgcaccggtactacgaccgccacgactgcagcttcgactacaagt

SEQ ID NO: 43107 - DNA, 473 bp, Oryza sativa
  unsure (1)..(473): unsure at all n locations
  Clone ID: uC-osroM202031f09b1
tcccctccgccctcctcctccgcttccttcccttccttccttccttccttccgcctcgcgtctcctcgtcctcacctcacctcgcctcgtcttcctcctcgcatcgccctagccctaggccacctcgccatttgatgcgggggcgcccgccatggcgtcgtgggggctgggctggaagcggagctccgagatcttccacctcaccctcgactacggggacctcgcggatggacctcctcaccatcaccagcagcagccgccgccgccgcagcagccgggctcccctcccacgccatccagcgcgggctccacgccgacgtcgtcgtcgtcttcgccgacggcgaggaggagcggcggcagcggcgagttcgggttccggatcgagctcgactggtcggcgggcgacgacgaggaccaggtcgcgctgcggctccagtcccagctcatggtcgcgctccccccgncgcacgacg

SEQ ID NO: 43108 - DNA, 527 bp, Oryza sativa
  Clone ID: uC-osroM202031f11b1
tttaatatgtgcaagtgctgacagatgtgatcaaaaaggtgtaagcgttgatgaacgtctaattagagttgctgaagcacttgaaaagttggtagaatcttatacacaaaaagaccttccaaatgctgttggcagtccagatgttgcaaaagtatcaaattcaagcatcaatgaagaatctgatggcccctctccaaaactctctgattggtctagaagaggctcagctgatatgcttgactacctccaggaggctgatagcactatttcactggatgacataaaaaaccttccttccatgacatgtaagactcgttttgggccaaaatctgatcatggaatggctacatcttcagcaggaagtatgacccctagatctccactaacaactccaagatctaatcacatagacatgcttttagctggccgaagtgcaattaatgagagcgatgatcttcctcagattgttgaacttgctgatattgcgcggtgcattgcaactactcctctagatgaagaaagggcac

SEQ ID NO: 43109 - DNA, 516 bp, Oryza sativa
  Clone ID: uC-osroM202031f12b1
ttcagatctgcagttggagcgtgtcaatgtgtactacaatgaggcctcctgcggtcgctttgtgcctcgtgctgttctcatggaccttgagcctggtactatggacagtgtccgcactggaccctatggccagatcttccgccctgacaactttgtcttcgggcaatctggtgctggtaacaactgggccaagggacactacactgagggtgccgagctaattgattctgttttagatgttgtgaggaaggaggctgagaactgtgactgcctgcaaggattccaagtatgccactctcttggtggtggtactggatctggtatgggtacactgttgatatcaaagatcagggaggagtaccctgaccgcatgatgctgacattctcagttttcccctcaccaaaagtatctgatactgtggttgagccatacaatgctacactctcagtccatcagttggttgagaatgctgatgagtgtatggttcttgataatgaggctctctacgacatttg

SEQ ID NO: 43110 - DNA, 534 bp, Oryza sativa
  Clone ID: uC-osroM202031g03b1
cttgatgcaatctcagctggaaagtactactattttgtccgtctgatgggtagaaaagcatctcacgtggcctttgaatgtgcacttcaatcacacccaaacatgcttatcttagcggaggaggtagcactatcaaaactcacactgatggaagttattaacaagatatgtgatggagtacaagcaagggcagaattagggaaattccatggtgtgctccttattccagaaggactaatagaaagcattccagaaatgtatgctctgcttcaggaaatcaatatcctccacaacaacaatgttcctgtggcagagatgccatcacaactgtctccttgggcagctgcgctgttccagttcttgccacccttcatcagaagagagctgctgctccatcaagaatcagacaactctgcccagctgtcccagattgatactgagcaattgttggcccacttagtagaagcagaaatgataaagagaacaaaagaaggaagatacacgggaaggaagctcagctcttgatgccatttc

SEQ ID NO: 43111 - DNA, 505 bp, Oryza sativa
  Clone ID: uC-osroM202031g06b1
ttttattggaggccatgcagtcacggccaattccatcgaacacgctctactatgctgcagatctccacggattggtcgttggtttgaatccatactgtcgacggcgatgcggaagaaatgcgcagatgagaagcaactcgtccagctcaaattcggcctgccggactgccagcctctcgccctgttcgctctgtgcacaggagcttcatctgatcccatgctgaaggtgtacacggcgaagaacatcagtgaggagctggagcgtgcgaagcgggagttcctgcaggcgagcgtggtggtgaggaagtccaagaaggtgttcctgccgcgcctcgtcgagcggtacgcccgggaggccggcctcgccggcgccgacgagctcctcgcgtgggcgcgcgacaacgccgacgcccgcgccacccaagacgccatccagcggctgtgcgtcgactccggcggcggccggaggaaggcagcgcaggccgtcgagtggctaccctacaac

SEQ ID NO: 43112 - DNA, 105 bp, Oryza sativa
  Clone ID: uC-osroM202031g07b1
tgtaacagcgctcgcgggttgcgcttgcgccggcgaagaagcgcggcggacgccagataaagccctccctccattgacatcaacatgggtgacaatcttgatgga

SEQ ID NO: 43113 - DNA, 539 bp, Oryza sativa
  unsure (1)..(539): unsure at all n locations
  Clone ID: uC-osroM202031g08b1
tttgcggcggcggcgctcgctcacctcctcgccggccggacggcgcgaggaggaatctctccacccccacactcctcgcgccggtgcccctccctccccctccatcctcctcgcgtttcgcttcccctcttcgcactactccgactcccagccggaagcgccggtgtcgatggcggacgatgccggtgccggtcgcactcgcagtcgcagggatccttccgatcgccctacgcgttcaggccaatttctaatcagggctttgctacgaggcgaattggaggagcgcactgcagacgcaaggtttatcccacttacaccaataatggaggatctatttgtcagcggcattgaagagattcccgaagacacttctgtgcatcaccagcaaactgatgagccaccaccatcctacaacaccattaggaggggtgaaggcacattaatggctgaactgcgtgaggctacggagcaactacgtttgtctttctatgccaacacagatgaagaaactcgggcacanatgaaacagttttgggatg

SEQ ID NO: 43114 - DNA, 154 bp, Oryza sativa
  Clone ID: uC-osroM202031g09b1
tcgttactccatctcactggcagatggggcattcgccctgttgccacaatgcatgcgggggcggccgcggctacactaacacactgtcctcacacattccgccgagcttttgttagctgtgctgggtcatgagtttggacatcagctagcacgc

SEQ ID NO: 43115 - DNA, 527 bp, Oryza sativa
  Clone ID: uC-osroM202031g11b1
ttcaaggctgcaaagaagggtggtgggaggcaattcaatggacttgttgatgtttaccgcaagacccttgcgtctgatggtattgctggtctgtaccgtggattcaacatctcctgtgttggtatcattgtctatcgtgggctgtactttggaatgtatgattctctcaagccagtcgttcttgttggcaaccttcaggataacttccttgccagcttcttacttggttggggcattaccattggtgctggccttgcttcatacccaatcgacactgttcgtcgtcggatgatgatgacatctggtgaggctgtcaagtacaacagctccttggatgcgttcaagcagattgttgcgaaggagggtgcgaagtcactcttcaagggcgctggtgctaacattctgcgtgctgttgctggtgctggtgtgcttgctggatatgacaagctgcaggtggtcgtctttggtaagaagtacggttctggtggtggctaagactagatgatgatgataagcagtggggaact

SEQ ID NO: 43116 - DNA, 513 bp, Oryza sativa
  Clone ID: uC-osroM202031g12b1
gtcagatcacatcaccacagtgtgggtgtaattaaggttgggaaacgagtaattagcttaggttaattaggattcgatccatcgatacgatggcgttgagaagaatgggcatcattcttgtgctcttggccattgctactctgctctcgccggcagtgtccgcacggttcatctctctgcccaccgaccatcttccaatcactacgccgcccctcgccgacggcctcggcttcgacctctacagcgactcgtgcccgcagctggagaccaccgtgcgctccgccgtgcaggcggcgctccagcaggagatcgccctcgccgccggcctcctccgcatcttcttccacgactgcttcccccagggctgcgacgcgtcgctgcttctgacgggagccaacagcgagcagcagctgccgcccaacctgactctgcaaccacgggcgctgcagctcatcgaggacatccgcgcccaggtgcacgccgcatgcggccccaccgtcttctgcgccgaca

SEQ ID NO: 43117 - DNA, 230 bp, Oryza sativa
  Clone ID: uC-osroM202031h01b1
tttcataagagcacaaggtcaaatctttagccaccaagatcccatcagccacaaatcgatccatctccaagctcaaaatcccaattctttccaagaaagatttttctcggaggccatgtcgaccgccggcggcggtggtggcttccgccggtgcaccatcaggtccgtctgggagcggtgtgtgatggcggtcgcgctgtttcatgaaacgtccgtctacaggacgccgt

SEQ ID NO: 43118 - DNA, 378 bp, Oryza sativa
  Clone ID: uC-osroM202031h02b1
ggcagaggcagcacagcttgatcgttcttccatcgatcgatcggcagctagcgctcacagtactctcgatcgctcgctcgcgctggtccgttgattcgttgtcctagatagatagctaaaggggggccatggcatcgacgacagcgccgtcgaggaccaactctcgggtgaactactcgaacgagatccatgacctctccaccgtgcagagcgtctccgccgtccccagcgtctactaccccgagaaatccttcgccgacatctttcctcctaaccttctcaagaaggtgatatcggaggtggtggcgacgttcctgcttgtgttcgtgacgtgcggggcggcgtccatctacggcgaggacatgaagcgcatctcgc

SEQ ID NO: 43119 - DNA, 378 bp, Oryza sativa
  Clone ID: uC-osroM202031h03b1
gtttctatagctaccactactgcccagcaacaagctagagagatttgccaaaagaaaaaatggcgatggctaggcgcggcaatggcggctaccagtacggcgcctacagctacggctactgctacagcaagccgcacgtgaactaccacagccagagctccgagagcgtcaccaccgtcgtgacgaagatggacgagatgagcgttcacgagaacgccgtgcataagatgttgttgtcgctccgggaggagaaggtgtacgagcagcatggcggcggtgccggcgacgtgcaggtgtgccgcaatggtggcgctgctgcaggcgccgtgcagaagcacacctactcggagaatgatgaggaggtgttcgaggagagca

SEQ ID NO: 43120 - DNA, 440 bp, Oryza sativa
  Clone ID: uC-osroM202031h04b1
gttaccatcctcatgcgagtactgaagaacgattttgtcaagtatgcccatgatgaggaagcagctgatgaccaagaagagtctggatggaagtatatccatggggatgtcttccggttccccaagaacaagtcctttttttcggctgctctcggcaccggaactcaactgtttgccctcacaacctttatattccttcttgcacttgttggagtattctacccgtacaatcgtggtgctctttttactgcattggttgtcatctatgctctcacttcaggaattgctgggtatattgcaacctctttctactgtcagctagagggaacaaactgggtgaggaacttgctgttgacaggatgcctgttctgtggacccctattcctgactttctgctttctaaacacttgtgctattgcttatagtgcaacagcagcttt

SEQ ID NO: 43121 - DNA, 524 bp, Oryza sativa
  Clone ID: uC-osroM202031h05b1
gtatagttagctcatttcctttcagcaggaacttatcaaaaacgtgatgaggtggttacaattacatctgctggtgacattgaggttggtagcaatgcaagaagggtgaaaaagggtgtttcaattgatagttcgaatgattcttcgggctcagcagagtcaggtttagtgtcaactaaggaggagacagctccaggtcataggagaacggcaagtgcctatgctgatattggatcatggactattacaattcctgatgaggccaatggcatcgatgaacaatcatttgatgatctgcccaaggtacctttggttaagagccctagctcttctgtattaatgaatgccttccaatcaaagacaagaatgaagacaaagaatggagccaagaagttggctggagctgaccaacaggatgttgtggaaactctttctctgacaaattctcgctcgtgccaggggtttgatgggttgtttcaagaagcaaaagttgcttgagcacctctgttgatgaggataactgc

SEQ ID NO: 43122 - DNA, 477 bp, Oryza sativa
  Clone ID: uC-osroM202031h07b1
acataactcacatgaccaaccggatctccgccatgggaggcaaccaggagtacatgatccgattcgacggccacatcgacgatgcctcgccgagctccgccactgcagagccaccgccgccgctgccgccgccgcgtcccttcgccgggagggcgatctcggccgagagggagcactctgtgatcgtcgcgacgctgctccatgtcatctccggctacaggacgccgccgccggaggtgttcccggcggcgcgcgcggaggtgtgcggggtttgcgggatggaccagtgcctcgggtgcgagttcttcgccggggagtccggggtggtgtcgttcgatggcgcggagaaggtggcggcggcggccgccgcggcggcggctggcgccgcggcggtgcagaggaggaggaggaagaagaagaacaagtaccgcggcgtgcggcagcggccatgggggaagtgggctgcggagatccgcg

SEQ ID NO: 43123 - DNA, 441 bp, Oryza sativa
  Clone ID: uC-osroM202031h08b1
tttcaccgcggcgtctctctctctctctcctcccccacccccaaccaccacttcctccatcaccaaagcgccgctccctcgccgtcgccgccacctccgccgccgccgccggtgccggtcgtcgaggcgggaggactcctccccgcgcgccgcgctcgatccgtccgctccccagtacgcccgagggcagtgatactctgctgcttagttgggtgcagtgtgcactacaagtctacaacaatggagcttgacagtctaagagaggcgtttgatcgagttattgaaaaacgggcttcctcttctgctaaagcttaggaagttattgatcagatagtgagtgaagttgagcaggcaatcacgaagatgcagatgatgaatacagattccatgggtactgctgaccattcattcatcctggcagaattgaaagccaagttgaat

SEQ ID NO: 43124 - DNA, 470 bp, Oryza sativa
  Clone ID: uC-osroM202031h09b1
gtagagagcaaagcaagagaagagagggcaccaccagaaggggggaaaaccgccacctctacgcgtcgccggagagcgcgccggtggcatgccggagcgccgcctaccaatatccactccggcggcggccggaccccgccgtcacccccgacggcagcggcgtcactgccgcctactcgtcctcccggccttcgccctcgcgcttgtctccctcgcctacctctccttctcttcccaccccaatctccccttccatgcaaaacatcatgatatggctagtataaaggatgttaaggagagaatggatcaaagacaaactctcgatgctaaggttaaggcaaatttgtctatgactaaagttgagtcggaacccttcaaaagacgaaagaaatctcgcaagcattatgtaccatgtcaaattgagtttttgccatcagttgatgatctagtggagcctggtatctacaaca

SEQ ID NO: 43125 - DNA, 526 bp, Oryza sativa
  Clone ID: uC-osroM202031h11b1
gttcttggtagtaggagattcttctccaatccgtgggagaagagctaggaggagcggaggaatccgtgtcccctcccgcggacctgcttctccggctgcccgaaacatgctttctccctatcagcctttgtgatgcattgaacaggggttgagaagtactgtaatttttgtaatggctgggtgttccttggcaacactgagaggacaacatcgagggagatggatccaatctcacagcaagctccccacaaggattatgtctattaatctgccaaagagtaatcacagtcacaagattcagcttccatgccagtccaatttaggaagaaaacagaaaactggtgcatttgctcctttgggttttcatggaaggtgttgccggatcgaaacatcagttaaatgttatttcttgcagtcgcttgtggattctgagagtatgatctcaccaaatttgttattgctttctgatgaagctctactaactatcagtatagtttttgcatatttggctggagttgtaccctct

SEQ ID NO: 43126 - DNA, 473 bp, Oryza sativa
  Clone ID: uC-osroM202032a02b1
ttccttctcctcctcgcgcctcccgcccccgctacgccgcgccgcaaactctcctcactgcgtcgccgccgccgcgcctcccgcactcttctagcacccagatccagagccggtggggaagttggatgtgacagatcaaggccgccggatctgttgagctcagcagcggcagcagcttggcgatgatggcagcaatgtctcagacatgccctccttcccactggtgacaagcatgaggccacggccgaagcttatctttcgcacctccatcagaccttgtaattctagggaagaagctcggccaactgcgaccttctaacgcagggaaggatggaaaggagtggcttctgcttgaagagctgcagggacagatcgccaggatacagggcagcctcgaggaatgtgaaccatggcaatctgcatagcccttcatttggaagctatgtccccccactattgagtactattttttt

SEQ ID NO: 43127 - DNA, 447 bp, Oryza sativa
  Clone ID: uC-osroM202032a06b1
gttggttgctcctcccgctcccgctacggttcggttcggttgggggccggttcgattgcggttgttccttcggttcgggggttggggggaaagcatggcggcgccggatgttgagtaccgctgcttcgtcggcggcctcgcctgggccaccgacgaccgctccctcgaagccgccttctccacctacggcgagatcctcgagtccaagatcatcaacgatcgggagacggggaggtcgcgcgggttcgggttcgtgacgttctcgagcgagcaggccatgcgcgacgccatcgaggggatgaacggcaaggagctcgacggccgcaacatcaccgtcaacgaggcccagtcgcgccgctccggaggcggaggcggcggtggctacggccagcgcggctgaagcggaggctactgtggctgcggctacggtggtggtggcggcggcgg

SEQ ID NO: 43128 - DNA, 346 bp, Oryza sativa
  unsure (1)..(346): unsure at all n locations
  Clone ID: uC-osroM202032a07b1
tcgttgagattgctcacatgtacaagactgatcgggccaagtacgagtccaccgcaaggagctggacccagaaatatgctatgggctagaatggttaacaataagaaatgtgagatatgccattgtattgccttgtattctcctgtaactctttcaacatttaagaaacagcaagaatcaaattgaactctcgagttgttgtatggaatcctactatagatgttcagctattgtaaattatgtagtgggtggttctattgattgttcgatgagcacttggaatggtacttttatgttccaaanaaaaaaaaaaatataacactacaatgaattttcaactttaact

SEQ ID NO: 43129 - DNA, 449 bp, Oryza sativa
  unsure (1)..(449): unsure at all n locations
  Clone ID: uC-osroM202032a12b1
tcgtttgagcatcttgtaccacctacgcagagttttgtttgcttgcttgtttgcttgtcagtgtccagaatggcagcgagggtggcgtggatcggcgcggcggcggaggtggaggacgtggcgctgatggccggtcgcgcgggggcccaccccgcctggtccataagcggctgcacgcacaccctgctgaacatgttgccgtgcctcaactacctgaccgggaacgagacggcgccgtcggcgtcgtgctgcggcaagctgggcgaggtggtgaagtcgcagccagagtgcctgtgcgtngagctcaacggcgacacgggggcgctcgatctcagcatcaaccgcacccgcgcgctcggcctncccgacacctgcaaggtccatacgcccgcggtcagcaactgcaagagtggcgctgctgctcctactgcgggacagacgccgacgac

SEQ ID NO: 43130 - DNA, 85 bp, Oryza sativa
  Clone ID: uC-osroM202032b01b1
ttgtttgacagaattcgcatggagcgtggactgcggtggatactaccatgagagggctggcttaccacatgcacgtccttgaact

SEQ ID NO: 43131 - DNA, 375 bp, Oryza sativa
  Clone ID: uC-osroM202032b03b1
ttattttgcagataggagatggaggagattcagttcattgtgtgcaaaaaagacgactgatctccccctgcaaatgtgtacggaggaagcctatgattggtattacaactcgtattgatgagcactacaccatggtgtttttcgagatcccggcgagcgtggattcagcacaaggcccaatctttctttggaacagttgagtgttggccctggggacactgcggacttactgcggaaagtacttccaggcattcgtgatgcaagtaagacctttgctatccctgcgttgaagcaagtgtttgaggacagcattcgtccactacttgttttaaagggtttacttattcaccagccttttgataaattcatgaaaac

SEQ ID NO: 43132 - DNA, 473 bp, Oryza sativa
  Clone ID: uC-osroM202032b05b1
ttgatacagagcatgccagtaatggcacgagcagcaacgataatggccatgctatgtcagttgagaataatgcttctgaagttgcagatactgacaacaaggaagattgcaatttggatggccagaacactagtggaaggatcgaaggcccttctgaagaaataccacccaatgcaaatggcatggatatcgattccgacagagaggaaacctacaatgtggaaggaattgctgagaattcagaggattgcagggtaagaggaggtggagatattgatacagaatgcaacctgagtttacctgagcacgaattgcccttacatcaggagagcaagtcagactccgagctgaaggaagcaaccaaaaccgaagacgaggcaaccaagaaaggccatcttgtgagggtgcaatcccgttcttgcgatcttcgagagtcgcatcgcgcgtcggccggtagctcaatggatttccac

SEQ ID NO: 43133 - DNA, 390 bp, Oryza sativa
  Clone ID: uC-osroM202032b06b1
gtcgtcgacgacgacgacgagctcgacgaggggaggcgcagcggcgatgactcagacagcgcgccgtcggtcgggagcgacctgtacaaggacgaggacgacaaggagcagctggagaagatgtcggagctggacagggagatgatcctggcggagcgcggcgcgcggatcgacgactacaagctgaagcagctggcgagggcgtcgtcgtcgtcgtccaaggcggacaagtcgcggagggacagcagccctccgccgtcgccgagccgcgcgcggtcgtcggccaggaccgacaggtccgccgccaagagcgcgctggacgagctgcgggccaagcggatgagggcagcatgacccggaggggtacccgaacaaggttaaggatttgat

SEQ ID NO: 43134 - DNA, 531 bp, Oryza sativa
  Clone ID: uC-osroM202032b08b1
tcgttcctctccacgccgaccgccatggccgccgccgccgaggtcgacgcggcccccgacctccccaacggatcctccgccaccgccacaaccgacaagaagaagtcgcgggagagcgagcgccgccgccgccgccgcaagcagaagaagaacaaggccgcgtccaacgccgcagatgcggatgcggccggggacgccggggccgacgacgacgccgccgaggagaagcctgatgtcaaaccccaggtggaggtggaggtggagtacgtcccggagcaggcggacctggacgacggcctcctcgccgacttcaagagcatcttcgacaagttcaccttcaaggattcctctgccgacgccgaggatgacgagaagaaagatgaggctggcactgatgccgcaaagaaggctgcagggtctgattcggacgacgacgagcaggggacacagcaaaagaaggaagggggcttgtccaacaagcaaaagaaactacaacgaaggatgaagtatgcagaactgaaacagatatgc

SEQ ID NO: 43135 - DNA, 433 bp, Oryza sativa
  Clone ID: uC-osroM202032b11b1
tcgttgagcatattgtcccacctacgcagagttttgtttgcttgcttgattgcttgtcagtgtccagaatggcagcgagggtggcgtggatcggcgcggcggcggcagtggtggtggtggcgctgatggccggtggcgcggcggtgcagccgccgtcgtccgacaagcgggtgcacgcagacgctgctgagcatgtcgccgtgcctcaactacctgaccgggaacgagacggcgccgtcggcgttgtgctgcggcaagctgggcgaggtggtgaagtcgcagtcggagtgcctgtgcgtcgcgctcaacgccgacacggaggtgctcggcctaagcatcaaccgcacccgcgcgcttggtctccccgacgcctgcaaggaccagacgccgccggtcagcaactgcaagagtggcgctgctgctccttctgcgg

SEQ ID NO: 43136 - DNA, 414 bp, Oryza sativa
  unsure (1)..(414): unsure at all n locations
  Clone ID: uC-osroM202032b12b1
tcgttagagcatcttgtaccacctacgcagagttttgtttgcttgcttgtttgcttgtcagtgtccagaatggcagcgagggtggcgtggatcggcgcggcggcggcggtggtggtggtggcgctgatggccggtggcgcggcggcgcagccgccgtcgtcgacaagcgggtgcacgcagacgctgctgagcatgtcgccgtgcctcaactacctgaccgggaacgagacggcgccgtcggcgtcgtgctgcggcaagctgggcgaggtggtgaagtcgcagccggagtgcctgtgcgtcgcgctcaacgccgacacggcggcgctcggcctcagcatcaaccgcacccgcgcgctcggccttcccgacgcctgcaaggttcagacgccgncggtcagcaactgcaagagtggc

SEQ ID NO: 43137 - DNA, 506 bp, Oryza sativa
  Clone ID: uC-osroM202032c01b1
ttaagaaggaaaaaaaaaggaggaaaagaaaagaggaggaaagcgaagaggttggagagagacgctcgtctccacgtcgccgccatggccgcccgcgccgccgccgccgcgttcctgctgctgctcatcgtcggcgcggccaccgcggcgccggacatgtcgatcatctcctacaacgcggagcacggggcgcgggggctggaggaggggcccacggaggccgaggcgcgcgccgcgtacgacctctggctcgccgagaacggcggcggctcgcccaacgcgctcggcggcgagcacgagcgccggttcctcgtgttctgggacaacctcaagttcgtcgacgcccacaacgcccgcgccgacgagcgcggcgggttccgcctcgggatgaaccgcttcgccgatctcaccaacgaggagttccgcgcgaccttcctcggcgccaaagtcgccgagaggagccgcgccgccggggagaggtaccgccacgacggtgtggaggagct

SEQ ID NO: 43138 - DNA, 518 bp, Oryza sativa
  Clone ID: uC-osroM202032c02b1
cactgttgctgctgttgtcttaagattgttagacctagattctgccatctcatacactcttcgtcagaaggtgggatcaaacaaggagcggggagctggagagttcatgaagcttccgccaagatatactcctgctaagaccaaacaagaaactgaacctatgggaacaggttttgatcgacaagaaacatggctaactccaagcaacggacgaggcggtcggggtggccgtggacgaggtagtcgaggcggtagcaggggaggcagatcccggagtcgtggtggcaaggtcccaagaggtattagcagctcccccaagatcgagttcaggggttacagtgccagcgccgtgtcatctgagaaagctcctcgaaagtatgctcgtcgagggcgtaatcgtggacgtgggcgtggacttagaactgttagacctcggcagccattagatattggagccagatcaattccaaagcaaacttgtgggcagcttagcatgctaaggatgcaagcatcaacag

SEQ ID NO: 43139 - DNA, 364 bp, Oryza sativa
  Clone ID: uC-osroM202032c03b1
ctggtttgttacaatacattttacatgaagtcattgagttgattaaaaacagaagtgatgaagtccatgcatcaaggcagccactccaaatgcgaaagcagaagcctgaaccaatcaggcagttgaatccgaaatttgaagagaattacattaaaggccttgattatgaccctgatcgggaaagggcacaaatgaagaaaatgaagaaacgccttaagagtgagaagaagggtgcaatgcgcgaactgcgtaaagataattatttcctgtctgctgcgaaagagaaggagaggataaaacaagagcaagagagagctgaaaagtatggaaaagccatggctttcctttaggagcaggaacatgc

SEQ ID NO: 43140 - DNA, 455 bp, Oryza sativa
  Clone ID: uC-osroM202032c04b1
ttgatgacttatcttcaacaagagtgtctaggaaaagggattgtgaggatgtgggcgaatcttcccttaaaaaatgtaaagtaaacccagttgaaggagcttgggattacgataagggaagttcgtttttagagtcggactggtttttcggtgatgatgagtttggtttagattccaatgagtataaagtggatacaattcccttagatcagatttctgaacagccaatcgagccaaataacaacgttgtttacataacggcgactcaaccccaccaacatccgatgagtatggggtctaattgccctgtttcagttaaattcggagcaattacccgtcattaccgagaatgatgtcagctgataggctttcttggcctaatcaattgattttatcagttcctcaacctttgttgcctgtttctctcagagctgggtcgacagggaataatttga

SEQ ID NO: 43141 - DNA, 549 bp, Oryza sativa
  Clone ID: uC-osroM202032c05b1
tgatttccctacatatcgacatcagaaggttcacatatgcagagctgaagctcataactaacaatttccaatcaatcattggaaaaggaggttttggtactgtttatcatggcatactggaaaataatgatgaagtagctgttaaggttcttgtggagacatccatagcagagtcaaaagactttctccctgaggtacaaaccttgtcaaaagttcatcacaagaatcttgtcgctttggtagggtattgccaaaacaagaagtgccttgcacttgtttatgatttcatgcctagaggaaatcttcaacagcttttaagaggaggatatgacagtttgaattgggaagagcgacttcacattgcacttgatgctgcacaaggtctggaataccttcatgaatcatgcaccccatcaatagttcacagagatgtgaagacacccaacatccttctggacaagaatttggtggccagatatctgatttgggctctcacggcttttaatgctgttacacccatatatctactggtgctgctggcactctggt

SEQ ID NO: 43142 - DNA, 396 bp, Oryza sativa
  Clone ID: uC-osroM202032c07b1
tcgatcatctccagctgatcaagagctcttaattagctagctagtgattagctgcgcttgtgatcgatcgatctcgggtacgtagcaatggcgtccaaggcgttcgctctgttcctggccgtgaacctcgtcgtgctcggggtggcaagcgcctgcggcggcagcccgtcgtgcccgacgccgacgccgtcgaccccgacaccgtcaacgccgacgccgacgccgtcggcgttcgggaggtgcccccgcgacgcgctgaagctgggcgtgtgcgccaacgtgctgggcctgatcaaggccaaggtgggcgtgcctccggcggagccgtgctgcccgctgctggaggggctcgtcgacctcgaggcggcggtgtgcctctgcacggccatcaggggc

SEQ ID NO: 43143 - DNA, 438 bp, Oryza sativa
  Clone ID: uC-osroM202032c08b1
ttcctcctctgcttccattctcgactccaccaagtgtttgcttccgagccctagctgcgtcgaggcgcgggagcaatggcggaggcggcggcgaggaggtgggcggcggcgctggtgctgctggtgcttctcaccggcaccgtcgagctcatcggcggcggaggcgggagcggcgggcggcggcttctcgctggcctccgggccgggagcacggcggcggcgagcggcacgcggcggtggctgcgcgactcggcctggccggcgacggggggggccgcggcggcggcgagcagaggagatgacggtgatggcgatgaggcgttgtccgcggcgatgacggtgcccggcgcggtggacgacccggaggaggtggtctcgcaagtgcacatgtcgatcaggaacagcacggcgaggaggaagctgggctacctgtcgtgc

SEQ ID NO: 43144 - DNA, 522 bp, Oryza sativa
  Clone ID: uC-osroM202032c09b1
tcgttgagaaactacactcctggggaaacgagaggtggtgttgatcgaagtgatttgaaacctcttattatcaatcaacctgagggcccgagcttccgcattaacggatattttgtggaatggcagaagtggaacttccgtattggcttcacccctaaagagggtttggtcatctattctgttgcatatgttgatggcagccgtggacgtcggccgatagctcataggctcagctttgttgagatggttgttccttatggagatcccaatgaaccacattatcgcaagaatgcttttgatgctggagaagatggacttgggaagaatgctcattctcttaagaggggatgtgactgtttaggtttcataaagtattttgatgcacacttcacgaattttacgggtggtgtggaaacaattgagaattgtgtatgtttgcatgaggaagaccacggaattctttggaaacaccaggattggagaactgctttagcaagaagtaggaggtcaaggaggcttact

SEQ ID NO: 43145 - DNA, 470 bp, Oryza sativa
  Clone ID: uC-osroM202032c10b1
tcgtctctccctacctcgctccgccgccgccgctcccctcccgacccgcctcgcttcctccctccgccgccgccgccgccgccacggcccggccggatcccacccggccgctcgattcgaggtcagatccaaaccccagccctcccaggtccgaatcgcgccgaatttttttctaggttttggtacggatctagggtttggcttgccgtgggaaattttcgtggggggaattctgtcgaatttctctcggcttccacggtctggttggattcctgctcatggccgctgggcgccacggaggatacagggactacgaggcaagggagcgggagctcgacgcggaggcttccaggaggagcaaggagcagcagcaccaccaccacccgagcggccgacaccaacgcggcgactccgacccccgctgcgaagctgaccggcgccgtgacggcggtcgcagcaggggcggcagg

SEQ ID NO: 43146 - DNA, 527 bp, Oryza sativa
  Clone ID: uC-osroM202032c11b1
accactgctagctcatcaccagtattcagtactactactgaataatgccccccaaagtgcagtgcaagtctgcacgtacgagctcatgagaatcaggtacatgtacaacaacttctactactagtagtatactactgctgctgccgccgatgctgcatgctacaactaggctacttgctagatcatcatcatagtactacacgtaccatcgtcgtagaatgcatcgtatacagatcaatcgatcagatgttcagaaccaaaaaaaggagaaattaagttaacaagatgcaaatcactatcagagtatatcagtagccggccatccagctcgagctagtgatcatcatcatcatcatcgatcaacggtggttgttgttgttggcgtcgtcgttgtgcaagaacggcgacgggatgaacatgtcctgcaggaggccgtaatcctgcgccatgaagtgctgcatccggagaggagtagtagcagcagcagcgctccccgtcccggttgatgacggtgcgtggtggaagca

SEQ ID NO: 43147 - DNA, 332 bp, Oryza sativa
  Clone ID: uC-osroM202032d02b1
ctagatcgcgagcggtcgtcctttttttttttttttctcttcatttattgggcgtttttttttttgctaatcatttcaatcaaacacgtaccatacaaagcatcacgcgaaaacattaaagcatctaatctagatcaacctaagtagtaaaaatctactagtagtgaatcaccggcgctaggttgcgcttgtacaagcttctcctccggaagaaatccccgaacttccttaggatcgacctcctcttcttctgcttcatggcggggtccaggtcgccgtactgcccgccgtcgaagtggtcgaactcgtagtcgaagtcgtccatggccgcc

SEQ ID NO: 43148 - DNA, 376 bp, Oryza sativa
  Clone ID: uC-osroM202032d03b1
gaattaagcccctctatatctggagttagggagcacatttttactagcagaaatggtgaacatggagtagtgccatattatgtcaagagttatcttaatctaacagaggatacaccgtcaactatatctttctccatcgcactctctaaaatatatatttatcaggaagatgtttgtagaacttattgatttgggtaatatttattcgtcgatgtcaaccatttcttgtccacaatgaatggttgatcgtattcaagatgacaaagccatatttatgcttcatagtttgagactactatatggtgagagaaatttatgtatgcctacaagagtgccttgtatgatttttgaaagatcaccaaaatggattttcctc

SEQ ID NO: 43149 - DNA, 374 bp, Oryza sativa
  Clone ID: uC-osroM202032d04b1
gtttatcccaagtcaagcaaaacagctcacaaaatactccagcatctagagagaactattccttctcctacagcaaagccactagagctaaggtggacttcagcaaagagaactacttcctctgttgtcaccaacatccagcataatgggcctgctactgatagtcatagacatagcagcatcaacgatagtggtagtgctcaacaggaaatttcagatgcaaataaggttctggctcctccaagcagctccaatgctgtggaatctagtccaaagatagagaatagtgggaccaagtcaatgccctcttcacaacatacttcagaatctgactcggcaaccacatcagctgctcaggtcttggataaaagcac

SEQ ID NO: 43150 - DNA, 529 bp, Oryza sativa
  Clone ID: uC-osroM202032d07b1
tcgttaagctagagcacgagggtcaggcaacgcgtttctctctcgctgaaaagtttgctggatttgctcctctccctctctccgccatggaggaggcccagtttgtggagtcaaaggatggaaccatctcagttgcttctgcatttgctggtcaccatgaagctgtgcaagatagagaccacaaattcttgacaaaagcagttgaagaagcgtaccggggagttgactgcggtgatggaggcccctttggagcagtcgttgtccgtaatgatgaagtagtagtcagctgccataacatggttctgaagcatactgatccaactgcacatgctgaagtgactgcaataagagaggcttgcaaaaagctcggaaaaatcgagctctcagattgtgaaatttacgcgtcttgtgagccatgcccaatgtgctttggtgcagttcatctctcccggatcaagaggctggtgtatggagccaaggcagaagctgccattgccattggatttgatgacttcattgcaaatgctct

SEQ ID NO: 43151 - DNA, 252 bp, Oryza sativa
  Clone ID: uC-osroM202032d08b1
tcgttataacttcgagtggtcgaacggctacacagttcgatttgggataaacttcgtagattacaatgacggaaggaagagataccccaagaactctgcccattggttcaagaagttcctcctgaaatgataaaaaagcaccattgcactcattgcttttctcattgaataataaaagagtatatgttttgcgtgaatttggtacaagagatggaagtaatccagttaaataataaatccctctcttactgc

SEQ ID NO: 43152 - DNA, 481 bp, Oryza sativa
  Clone ID: uC-osroM202032d09b1
tcgtaagaagaagagaaacaacaagaagtagtaatggcttcctctatgctctcctccgccgctgtggttacatccccggctcaggccaccatggtcgctccattcaccggcttgaagtcatccgctgcattcccggtcacccgcaagaccaacaaggacatcacttccatcgcaagcaacgggggaagagttagctgcatgaaggtgtggccaccaattggaaagaagaagtttgagactctatcttacctccctgaccttagtgacgtcgaattggctaaggaagttgactaccttctccgcaacaagtggattccttgtgttgaattcgagttagagcacggatttgtgtaccgtgagcacggaaacactcccggatactacgaaggacggtactggacaatgtggaagcttccattgttcggatgcaccgactccgctcaagtgttgaaggaagttgaagaatgcaagaaggagtacc

SEQ ID NO: 43153 - DNA, 385 bp, Oryza sativa
  Clone ID: uC-osroM202032d10b1
tcgtctcaacctcgactgctttcccgccggcggcgtcaaggtctgcgccggcgtgcgtgcgtaccaaggccaccttcacccctgcgctgttgactaccacagccgacgcgtgctgagcttggcggcctaggcgatcgaggagattgcggtggatgagcggaccatggtcgtcgtggaggccggtgcggacacggtaacacatgcataagtggagcggagtcaaacaagcactgatattattagttgattaaacagacttgaccgatctcgtgaatggccttcaagccttgggggcttctattatttacactggtggtacactatgaagtatggaagcagttggagtggatggtactaaagtttaacataataacaaaattttctg

SEQ ID NO: 43154 - DNA, 511 bp, Oryza sativa
  Clone ID: uC-osroM202032d11b1
tcgtctttatattgtgtaactaggtaatagagaagcctaacctcctcttcttcaaggcgatcatcaacttcctgcaagtcctcctgaatttccttctcaaattctttgaagaatatgatctaaaaagaagagaacaaatgtcatagttcacagaaaaaacataaacacgattattaaccctctgaccctcatgcaggtatgaacttgacaagtgcacaagtgcaaaaagggtgtggaagtaacagtagtaaggttaataatcagccttaattatattgttaaattctgctgacatcttccatgaaaaggaaaagcctgaaatttttatcatgaatgatgttcaaacttgccatttcaaaaggtatattcattcttccacaagggtatattatgtgagaataacaagtgtagctgcaagaggtccaagcatatacttaataaatgcaatgcatatgcaagtcgatgaaaaccttacttgatatcgatttttggaggttggataccacgagca

SEQ ID NO: 43155 - DNA, 463 bp, Oryza sativa
  Clone ID: uC-osroM202032d12b1
tcgttcatttggctcttcagactttggttgggaggatgacaccctgaccccagactacacttcagtcttcgttcctaatgctgccatgccagcatatggtgaacctgcttacctgacaggtggagcgccaaagagaatgaggaacaactatggtatcgccgtgccccagggaaatggcatgcctaatctcgcacaaaacatgcccaccttcgatcccgagatgaagtatttgccattaccttatgttgagagcagctcagatgaatcaatggacaaccttctgcaaaatgatgctacacaagacggggcaagcaacgagggcatctggagccttgatgagcttgctcatggcagctggggcctactgaggagaccaaatgttctgtcagtgtggtctgtcactagcaaaccattgtgaatgtgtatggccaagatgaagagctggtgatgtctgctatgtttt

SEQ ID NO: 43156 - DNA, 350 bp, Oryza sativa
  Clone ID: uC-osroM202032e01b1
gaatgagttcattcagtacactgattcactcactcccgagtcccgacctccctcgcacgtgcttccctgcgtcgaccccgtcccgacccgtccccctcactcgccgccgccgccgccgccgccgacgccgacgccgaggacgacgacgacgatgccgcggaaggcctcgtcgacctcagattcgcgcctgaaatggcggaagtggaagcggaaccccaccgcgtccccgtcgccgtccaaccgctcgcggccgccgccgccgcggcggaccacttcgacgactccgactttcgcggcgttaacgaggacgacgactccgcggtccccgaggacgccgactactaaaccct

SEQ ID NO: 43157 - DNA, 327 bp, Oryza sativa
  Clone ID: uC-osroM202032e04b1
gtgtatctagtttatgatcactcaattcaggcatttctgccatatgatcgacagtggataaagcaaaagttgttccaacacttgaagaagctagctcagcggtagtgagtggtttcagttcgatatctctcaccagcgagaagagatgtggccatggttgtcagaggtgttacctgtaaaacaatgagagtttcacattgtgtgctcatattctgacaaaacttaaatttcaatgggttgcctctggtacccaatatatcagttaaacttatctgctgtgtctctttgtgaataaaagaaggatttggctgttaaaaataaaacaat

SEQ ID NO: 43158 - DNA, 465 bp, Oryza sativa
  Clone ID: uC-osroM202032e07b1
tcgttcgttgtctcctccgctccttgcgccgccgccaagacgagtcgcgtcgcggctgaacaggggagggccgggcggcgatctccatctggcgagcagagcagcggaggggaggggatcctgaggaaatgcaagttaataaagaggcacctctggggtgcctcaagccaatttctcagtataacctgcaagagcagagaagcaacgggtttcctgagaatagtgaaaaaaagaatgatagtattgcaacagaaagagtcttggaggcatctcctcttccaaatcaaggctttttcagacccgttcaacggacagaatattatgcctatccatttatttatgctgattaccaaatgccgggacagccacaaccttacaacttagataaccaattttatcaaataaacagggaccacagttttcctattgagagtagagttcaatatcttccattcaagatgcccc

SEQ ID NO: 43159 - DNA, 522 bp, Oryza sativa
  Clone ID: uC-osroM202032e08b1
tcgttcaggcgatcaagtacgagaaggggtcgttcatcacgtccaccggcgcgctggcgacgctgtccggcgccaagaccggccgttcgccgagggacaagcgcatcgtcaaggatgaggcctccgcgcaggagctttggtggggcaagggttcgcccaacatcgagatggacgagcacactttcctcaccaacagggagagggccgtcgactacctcaactcccttgacaaggtgtttgtgaacgaccagttcctgaactgggacacggagaaccggatcaaagtccgtatcatctcggccagggcgtaccactcgctcttcatgcacaacatgtgcatccggccgactgaagaggagctggaggagttcggcacgccggacttcaccatatacaacgccgggcaggttccctgcaacccgtacacgcactacatgacgtcgtcgacgagcgtagacatcaacctcgctaggagggagatggtgattcttcgcacgcagtacgccggggagatgaagaggg

SEQ ID NO: 43160 - DNA, 430 bp, Oryza sativa
  Clone ID: uC-osroM202032e09b1
tcgttaacacctcgccgccgtttactctctctctctctggctgcagcggacgacgagaacatgcaaggaggaggcggcgtgagctgcgcggtggccggggacgcgccgtcgtcgacgagggggggaggcggcggagggatgctggggttgacgctgttcgacccgccgggaggggagcagccggcggagaggatcgggaggctggtgcgggagagccccgtggtgatcttcgcgaggagggggtgctgcatgtgccacgtcatgcgccgcctcctcgccgccgtgggggcgcacgccaccgtcatcgagctcgacgaggccgccgaggaggccgcggggttcgcggccgccgccgccgctgttccggcgctcttcgtcggcggcgccccagtcgggggcctcgacggccttatgggccttcacctcagcg

SEQ ID NO: 43161 - DNA, 537 bp, Oryza sativa
  Clone ID: uC-osroM202032e10b1
tcgtttcctttcccacatcctcctccgccgccggctgcttcccaccggctcccgatctccgaggcaagcagcgccgcacccggccgctgccgccgccgccatggcgttcgagaagatcaaggtcgccaaccccatcgtcgagatggacggtgatgagatgaccaggatattctggcagtctatcaaggacaagcttatctttccatttttggatctggacattaagtactatgacttgggagttctccaccgtgatgcaactgatgacaaggtcaccgtggaggctgcagaggctactctcaagtacaatgtggctattaagtgtgcgacgattactccagatgaggctcgggttaaggagttcaacctaaagcaaatgtggaagagccccaatggcacaattaggaatattatcaatggcactgtattcagagagccaattatatgcaaaaatgtcccaaggcttgttccaggatggactaagcccatttgcattggaaggcatgcttttggtgatcagtaccgagcaactgatgc

SEQ ID NO: 43162 - DNA, 552 bp, Oryza sativa
  Clone ID: uC-osroM202032e11b1
cgacacgaggtaagaagcccagaagccctagcgccgccgcagcagcagcagccatgggtatcgacctcgttgccggcgggaggaacaagaagacgaagcgcaccgcgccgaggtcggacgatgtctacctcaagctcctcgtcaagctgtaccgtttcctggtgaggagaaccaagagtaacttcaatgccgtgatcctcaagaggctcttcatgagcaagaccaaccgcccgccgctctccctgcgccgcctcgccaagttcatggaaggcaaggaggagaacaacattgctgtgattgttggtacagtcactgatgacaagaggatccaagagattccgaaaatgaaggttactgccctgaggttcacggagacggctagggcaaggattgtcaatgctggcggcgagtgcctcaccttcgaccagcttgctctccgtgctccgcttggggagaacacggtcctcttgaggggtcccaagaatgcccgtgaggccgtcaggcactttggtaaggctcctggtgtgccgcacagccacacgaagccatatg

SEQ ID NO: 43163 - DNA, 376 bp, Oryza sativa
  Clone ID: uC-osroM202032e12b1
tcgttctccttccacgaggctcctctcctggtcctcctcctcctcctccgacgacggcgccggcgccggcggcgagctgtcccgccctcgcaggcggtggcgggcgcttgtcctggggctcggggtgaggaggaagaggagcatggaaggggtgttcgggttcagggagatgatgggggaggagtttatgggcatgttcctgcctttctttggcaagatggttcagaaagtggtttcagatgaagtagagaaagcagtttgtcagacaaggcactacaccagcgcctacaagactgctagtgggattggatcagcatcgttcaaggtatcaacttcgtgttcctgaatgaactaaagcctgtttacacactgatga

SEQ ID NO: 43164 - DNA, 364 bp, Oryza sativa
  Clone ID: uC-osroM202032f01b1
ttcgtagtgtgggagctaaatggactaacatcaatatagcaccagatgagaaagtggagtcatttgaactggattatgatggaaagcgtgaccgctggaacggttacgacccatcgacgtacacccgtgttattgcagattatgaagctagagaagaggctaggaaaaagtatctgaaagagcaacagctcaagaaacttgaggagaaggatggtgaggagggtgacgagaacgtggctagtgaggaggaggatgaagaagatggtttgaagatagatgaggctaaagttgatgagagtgctcaaatggattttgctaaagtagagaagcgtgtacgtacaacaggtggtggaagcactggaac

SEQ ID NO: 43165 - DNA, 528 bp, Oryza sativa
  Clone ID: uC-osroM202032f02b1
ttatttataggttgacaagaaatgtgctctttttttaatggtgtaacaataagtgaagaacaagctcggtcaggcattgtagtcagagactcagagtcacctcagccgcacaaagtaaatttaagatatgagctacttttcttcgaacaagaaattgatggaggttatggactagctctgcaggcatccaagctgaggtgaatcacatgagacaaaatggcagtcttgctttcaatgaaagccttgttgctggtatatttcttcattttgccggtgcaagacccacactggtcttccagaccatggaatggtagtgcatcaatagggctgcagcagggtgacacaccagcaccacggttattggattcaagagtttgccaaggagcagcaattaaatgattagcttccacctttaattttgctggcaagtagtctgtcgagggcttctttttttcagttatggcaatgtagagcacttttcagagtttaatatgacacaaaggcttcagggaacatatatagtcaact

SEQ ID NO: 43166 - DNA, 519 bp, Oryza sativa
  Clone ID: uC-osroM202032f04b1
gaactcggaaaaagggaaaaaagaatccgtctttgcatcccacatccctgtctttctcctctcctacccttcttcttcttccacttgaagctttttctctcttggtcttatcctcctccttgttgttgcgggaagaggcaggaaggaggaggttttgtggtgcgatcttgttggggtttcaggtcagaagggagaaggggagaggtcagccatggcattgcctgtttccctcctccgcatcgcggcggttctgctcgccatcttgccattctgcgccacgcatccaagccccgggttccatgctcctcgcgagtttcacaaggcactcgtcccagatagatatggatttgtggcaagaagatcaattgctgaagctcctgttgacgtaaatgtcactacaaacagttcctttgtcttggcgcatgagcgaacatatagaaaagaccccttgaatggattcaagaaatatactggcggttggaatattagcgaagtgcactatatggctttcagtggata

SEQ ID NO: 43167 - DNA, 377 bp, Oryza sativa
  Clone ID: uC-osroM202032f05b1
ttagtcctagctctcccctatccctcgccgcacgcaccaccaccaaccatggccggcgcgcaggagtctctggtgttggccggcgtgatgcacggccacaacgacgtggtgacggccatcgcgacccccatcgacaactcgccgttcatcgtctcctcctcccgcgacaagtcgctgctggtgtgggacctcaccaaccccgtccagaacgtcggcgagggcgccggcgcctccgagtacggcgtgcccttccgccgcctcaccggccactcccacttcgtccaggacgtcgtcctcagctccgacggccagttcgcgctctctggctcctgggacggcgagcttcgcctctgggacctcttcaccggggtcaccac

SEQ ID NO: 43168 - DNA, 390 bp, Oryza sativa
  Clone ID: uC-osroM202032f06b1
gtcgttcgccgtcgaagccgatctcctgcgcgcggagctgctagcctctgtcagtcaccagctgtacagtatgagttcactggagagtgcaagagcagatcttgctctgcttattttatacctaaacaaggctgaagcaagagataagatctgtagagctatacaatatggctcgaaatttgtgagtaatggacaaccagggcctgcacagaatgttgacaagtcgactagtctagctcgtaaagttttccgactttttaagtttgttaatgatctgcatgctttgattagtcctcctgccaaaggaactccactacccctgatcttacttggaaagtcgaagaatgcactgctatcaactttcctctttctggaccaaattgtatgggc

SEQ ID NO: 43169 - DNA, 540 bp, Oryza sativa
  Clone ID: uC-osroM202032f07b1
tcggtcactctctccgagctctcgcctctcctcctcccccgtcttcccttcgcgcgcgccacccccacacacgcgaccatggcggcagtggcaggaggcgcagcgcgggcgctgtcgcaggcggagcaggacgtgcagatgatgctcgccgccgacgtccacctcggcaccaagaactgcgacttccagatggagcgctacgtctacaagcgccgctccgatggtatctacatcatcaacctcggcaagacatgggagaagctgcagctcgcggcgagggtgattgttgccattgagaacccccaggacatcattgtccagtcggcccgcccctacggccagcgcgccgtcctcaagttcgcgcagtacactggcgcgcacgccattgctggaaggcatacgcctggtacatttaccaatcagctccagacctccttcagcgagccccgtctgctcatcctcactgacccaaggaccgatcaccagccaatcaaggagtctgctctgggaaacatcccgaccattgccttctgtgacacc

SEQ ID NO: 43170 - DNA, 522 bp, Oryza sativa
  Clone ID: uC-osroM202032f08b1
tcggtcagcaagtgttcactgcgttcttcttctcgatttatctttcttggtttcttgatctgtagcttattagcggccatgtgcggcggagcaatcatctccgggttcatcccgccgtcggccgctgcggcggcggcggctgcggcggccaagaagcagcagggcaggagggtcacggccgacgtgctgtggccggggatgctgcggaaggggaaggcggcggcggcggaggaggactttgaggccgacttccgcgagttcgagcgtggcatgagcgacgacgaggcggaggggggcggcggcgaggaggaggaggacgacgacgacgtggtcgtggtggtccccccgccggcggcggcgaggttcgtcgtccgtgccgcggccaaggcggcgcccccaactgcagatgggaatgttgactacaaagcttgtccaacatgatggacctactgttagatcagcaaagcacaagaggaagaatcagtacagggggatcccgcagcgtccctggggcaaatgggc

SEQ ID NO: 43171 - DNA, 536 bp, Oryza sativa
  Clone ID: uC-osroM202032f12b1
tgcttagctagctagcacgacagtacaaatatatatactactacatctgaagaaattgttggtgtgttagttcatggctgctgctgctgcttcttcttcagcaatggcggcgaaggcggcggtggtcatggcgctgttcctggcctgcactctcgaccgggcatggacgccgaccggagcggcgaggacgatgacgatgatgatggtgcagagaggcgaggtttctgcggtggtggctgtcaatggcggcggcggtggcggtggtgaacgagggaataatggtggtgcgcagccggagcagaggaaggagttcgtcgggatggcggcgttcacgcggagcctcgccgtggcgccgccgccgccgccgagcgtccatggcgacagggaggtgccgagcgggcccgacccgatacaccacggcgcctcgccgtcgtcggcttcaccgtagagacatatgcgtgcatgccatattaatatagagagtgagactagtggtgcatggtgagtgtagacgtacgtgtcaagggaaaagtcca

SEQ ID NO: 43172 - DNA, 449 bp, Oryza sativa
  Clone ID: uC-osroM202032g01b1
gtcttcttgccccgcaccgcaaccgcggtgcggaggaggagagctctcgcgccgcgcgtgcgcgcgcgcgtgcgggcgtgcgcgggcgatcgaatccgatcgccatgaccggcgccgacgagccgtccatcacccgctggacctttgaggacttcgaggtctactacgaggtgcgcctcggcatccgccgcgagcccgggggagatgaagacggcgacggcgacggcggcggaggtcgcggctacgcgccgcttggatccggcttcgcgggcagcacccgcccttccgcggtgcacgccaacggcggcgccgacctggccgtttttgagcagtttgagcggctggagaggaaagtggagcttttgaatggagcaattgaagctgggccttcgcagaaatccctactttctttttttgaatctgcaaaaatgcgcaatttagctgagaca

SEQ ID NO: 43173 - DNA, 312 bp, Oryza sativa
  Clone ID: uC-osroM202032g02b1
ggcttcttccacgaggctcctctcctggtcctcctcctcctcctccgacgacggcgccggcgccggcggcgagctgtcccgccctcgcaggcggtggcgggcgcttgtcctggggctcggggtgaggaggaagaggagcatggaaggggtgttcgggttcagggagatgatgggggaaggagttcatgggcatgttcctccccttctttggcaagatggatcagaaagtggtttcagaagaagcagagaaagcaattttcagacaagtcagcacaccagcgccttcaagactgctagcaggattgaatcagc

SEQ ID NO: 43174 - DNA, 459 bp, Oryza sativa
  Clone ID: uC-osroM202032g04b1
ttcatgcctcactcgcctagaacccctcctcctcctcccgatctccgaggcaatcctcctcgaattccccgcgccccgatctccccctgacgccaccctcctcctccgccccggatcgccccgcccgatctcgccgcggggtcgaatttccccttctcttgtctccgatcagggccgcctcgatcgaaggcggcgccgcgccgaccatcccaccttgtttggttgtaatttcttcttgtcgcgtgaggaggggggcgtggcggcgggggagagcgcgtgagcgggcgggagatgggggcgccgaagcagaggtggacggccgaggaggaggccgcgctcaaggcccgcgtggcgaagcacgggacggggaagtggaggaccattcttcgcgacccggaattcaccgcgcttctgcggctgggaaccaaagttgacctcaaggataagtggcgcaacttg

SEQ ID NO: 43175 - DNA, 505 bp, Oryza sativa
  unsure (1)..(505): unsure at all n locations
  Clone ID: uC-osroM202032g05b1
gttcaccgccgtgtttttcgttcgttctgtttcttggtgttcttgaagagttcctgaaattgagtcatggctgccaagctagctcgcctccacagtctccgcgaacgcctcggtgccaccttctcgtctcatcccaatgagttgattgcactcttctctaggtatgttaaccagggaaagggaatgctccagcgtcaccagctgcttgcggagttcgatgccttgatcgaagctgacaaagagaaatatgctccctttgaagacattctccgggctgctcaggaagccattgtgctgccgccctgggttgcactggccatcaggccaaggcctggtgtctgggactacattcgggtgaatgtaagtgagttggcagtggaagagctgagtgtttctgagtacttggcattcaaggaacagcttgttgatggacacaccaacagcaactttgttcttgagcttgattttgagcccttcaatgcctnctttccgcgcccgtccatgt

SEQ ID NO: 43176 - DNA, 242 bp, Oryza sativa
  Clone ID: uC-osroM202032g07b1
tcgttttgatttgggtggttgccattcatctccatctctcgatccatttctccccccaaattcttctccaatcagctcgattccgtcctcttcgagcagatcagctcccgctgatcgaatcggtgtcgaattttggttgtggttgctgttcttgggttggatcttggtggtgagaaagatcgtgatttttgttgttgggatttgggaggaattcagttgcgctggacggaggagatgagctc

SEQ ID NO: 43177 - DNA, 541 bp, Oryza sativa
  unsure (1)..(541): unsure at all n locations
  Clone ID: uC-osroM202032g08b1
tcggtctcttctccggctctctctctcttctcctcctcctcatctcggcaaaaccaccaccgcattgccggtatatttagttaagccgcgatagaggagggagggatagcgtagagggagagggaacaggggagggtggcgagctcctgaccatctctctccgccctcttcgtttcgccgctcctcgccggatccatcttcaaaagaggacgtcggagaagatgatgggcggattcctctcccgggtcctcctgttggcctttggctacgcctatccagcatatgagtgctacaagactgtcgaactgaataaaccagagattgagcagctcatattttggtgtcagtattggattctagtagctctgatgacggttatggagagatttggagattctacaatatcatggctaccattttactcggaagcaaagctgatgttctttatatacttgnggtaccctaagacanagggaactacctacatttatgggactttttttaggccatatatttcacagcatgagaatgaaattgaccg

SEQ ID NO: 43178 - DNA, 452 bp, Oryza sativa
  unsure (1)..(452): unsure at all n locations
  Clone ID: uC-osroM202032g09b1
gttcactgcgttcttcttctcgatttatctttcttggtttcttgatctgtagcttattagcggccatgtgcggcggagcaatcatctccgggttcatcccgccgtcggccgctgcggcggcggcggctgcggcggccaagaagcagcagggcaggagggtcacggccgacgtgctgtggccggggatgctgcggaaggggaaggcggcggcggcggaggaggactttgaggccgacttccgcgagttcgagcgtggcatgagcgacgacgaggcggaggggggcggcggcgaggaggaggaggacgacgacgacgtggtcgtggtggtccccccgccggcggcggcgaggttcgtcgtccgtgccgcggccaaggcggcgcccccaactgcagatgggatgttgactacanagcttggccaacatgatggacctactgctagatcagccaag

SEQ ID NO: 43179 - DNA, 507 bp, Oryza sativa
  Clone ID: uC-osroM202032g10b1
gtcgggaagcacgcggtgatggcgcggacggggctgccggcgcgcgacctgcgggtgctggacccgctgctgtcgtacccttccacgatcctgggccgcgagcgcgccatcgtcgtcaacctggagcgcgtcaaggccgtgatcaccgccgccgaggtgctgctcccgaactccaaggatcccgccttcgcgagcttcgtctgcgacctgcaggcccgcgtcctcgcctcgtcctccgaccaggctgcagaatttactgatatggaaggcgaatcatctgcagttacttcaccatttcctgctctgacttcaaccacaccaaatgaattggagatgactaacaagaattccaatgtggtaggcggaatgactcacagcaacagtatgcccacattgactgctgcaaaagatggaaataccaaagttttacccttcgaattccgagcacttgaagtgtgccttgagtcagcctgtagaagccctagagaggaaacgtcgactctggag

SEQ ID NO: 43180 - DNA, 539 bp, Oryza sativa
  Clone ID: uC-osroM202032g11b1
tcgttctctcgcgccgccgccgccgccgagcgcctggagcagcgtcagccatggccgtaggtaagaacaagcgcatctccaaggggaagaagggatccaagaagaagaccgtcgatccctttgctaagaaggactggtatgatatcaaggccccgtcggtgttcaatgtgcggaacatcggcaagaccctcgtgtccaggacacagggtacaaagattgcttctgagggcctaaagcatagagtgtttgaggtctccttagctgatctccagaacgatgaggatcaggcgtacaggaagatcagacttcgtgctgaggatgtgcaagggaagaacgtgctcaccaacttttggggcatgtcgtttactaccgataagctcagatcacttgttaagaagtggcagacactgattgaggctcatgtggatgtcaaaaccacagacggctacatgctgcgtctgttctgtatcggcttcaccaagcggcggcctaaccaggtgaagaggacttgctatgctcaagcgagtcagatcagacag

SEQ ID NO: 43181 - DNA, 380 bp, Oryza sativa
  Clone ID: uC-osroM202032h01b1
ttcagtcaatcgcagcgagaagccaagaagcactcaaccacgcgctgttcgtcatggcgagggtacagctctgggtggccgccgcgtgcgccgtcgtgctcgcgctcgccgcgccctcgctcgccggcgaccccgacatgctccaggacgtctgcgtcgccgacttggcgtccccggtgaagctgaacgggttcccgtgcaaggcgaacgtgacggcggacgacttcttcttcgcggggctgaagaaccccggcaacaccaacaacccggcggggtcgaacgtgacggcggcgaacgtgcagtcgttcccgggggtgaacacgctgggcgtgtctattgcgaggatcgactacgcccccgggggacagaacccggcggac

SEQ ID NO: 43182 - DNA, 398 bp, Oryza sativa
  Clone ID: uC-osroM202032h02b1
ttcgtacagatgcaagatgctgaggctatccctgcattagaggcagttctcaaagatctttcacttcatccaattgtccgacacgaggctgcggaagcgcttggagctattggcctggaaaagagcatttccctgctggaggagagtttagctgttgatcctgccgcggaagttcaagaaacatgtgagctggctattagacggatagaagagcaaaagaatactagtggagttgaaagtgcaactgtttcaccttttctctcagttgatccagcactgcctgcaaagcaaggacttccagtagaacaactaagggagcttcttctcaacgagcaaagaagcatgtatgaacgttatgcagctctctttgcactaaggaatgacagtggagatgctgc

SEQ ID NO: 43183 - DNA, 411 bp, Oryza sativa
  Clone ID: uC-osroM202032h03b1
ttcatgcctcactcgcctagaacccctcctcctcctcccgatctccgaggcaatcctcctcgaattccccgcgccccgatctccccctgacgccaccctcctcctccgccccggatcgccccgcccgatctcgccgcggggtcgaatttccccttctcttgtctccgatcagggccgcctcgatcgaaggcggcgccgcgccgaccatcccaccttgtttggttgtaatttcttcttgtcgcgtgaggaggggggcgtggcggcgggggagagcgcgtgagcgggcgggagatgggggcgccgaagcagaggtggacggcggaggaagaggccgcgctcaaagcccgcgtggcgaagcacgggacgtggaagtggaggaccattctccgcgacccggaatttaccgcgctc

SEQ ID NO: 43184 - DNA, 315 bp, Oryza sativa
  Clone ID: uC-osroM202032h05b1
tcacttcgtagggtttttgcttgcttctcccggctgcaaagcggagccgcggcgcggcccggggacgaggagggaggggagccatggagatcgggcagcatccggcgagcggctactccaaggagcaccagaagacctaccaggagtggttcgccttcgccgactcagatggcgacgggcgcatcacggggcccgacgccatcaagttcttcgccatgtccaagctcccccgcgccgacctcaagcaggtttgggcaatcgcggactccaagcggcaggggtacttaggtttcagcgaattcgtcacggcaatgc

SEQ ID NO: 43185 - DNA, 379 bp, Oryza sativa
  Clone ID: uC-osroM202032h06b1
ttcattttccgcttgcatcttgctcattcagatctcttctgctttgagcaatggccaacctcaccgacctcgttaacctcaacctcagcgactgcagcgacaagatcatcgccgagtacatctgggttggaggatcgggcatagacctcaggagcaaagcgaggactgtgaaaggccccatcaccgatgtgagccagctgccgaagtggaactacgacggctccagcaccgggcaggctcccggcgaggacagcgaagtgatcctctaccctcaagccattttcaaggacccgttcaggaggggcgacaacattcttgtgatgtgcgactgctacacgccacagggtgagccaatccccactaacaagaggcacagtgc

SEQ ID NO: 43186 - DNA, 328 bp, Oryza sativa
  Clone ID: uC-osroM202032h07b1
tttattttcttctctcctcttctcttcttcctcctctcctctcctctcctcgctctccatccatctcgtcttcttcttcctcctcctcagcttcgagatttcagcttctccaaacccccattcttcccgccacaagctctgctctgtgctttgctcgctcgcctttcccgccattggtgtgcttcgctttcttggcttcaaagatccgacgagctctgtgatagctggggagaagaagaggaggagaggaggatgctgggagcgagccctaaggccaagaaaggcgcgacggtgaagttcgggtcgatgaagaatcctcctcctcccc

SEQ ID NO: 43187 - DNA, 540 bp, Oryza sativa
  Clone ID: uC-osroM202032h08b1
tcggtaagcactgaagatcaatcagtagggggccggttggatgttaatgatgcaggcactgaaaatgtgggttctattgtaacgcctgtgcgtctaccatttactaacagttctgatatgtcctacagtacacccagcgagtataccatgcctctccaggcagaagatgctcatggagatgtcactaatctcagcgcgtctgaactaaaaaataagcgttctagagagtggtacgcatcattgaccaaagagcaaaaggaagatagaaacaggaaggcacgcgatgccaggaggcggaggaaggatgaatctcaaggtaatgtgcctaaagctacgacgtcaaaattttctactcctactcctacgcttggagatatttctattgtcaccgctggagatcccgcaggaagggaacaatgggttagtaatgatgaattattggacacccctacaacaaagggaacaggttgacaaagcaatatggactatagacgcagtggaagcattgtaggcgtgtgcaagaaatggtgaagggatgca

SEQ ID NO: 43188 - DNA, 367 bp, Oryza sativa
  Clone ID: uC-osroM202032h09b1
tcgttcactccagaagttacatcacgcattgctaaccgagctgtgatcaaggagctggtaaatctgtacaaggcatcttatctgggtgggaggctgcctgcatatgatggtagaaagagcttatacacggctggcccattgccgattacttcacaggagtttcagatcactttacttgacgacgatgatggttctggttctgagaggcgacagaggactttccgagtagtaatcaagttcgccgaacgggccgaccttcaccggcttgagttgtttttagctgggaggcacgcagaagctccacaggaggcactgcaagttcttgatattgtgctgcgagagctaccatcagcaagatatgcgccat

SEQ ID NO: 43189 - DNA, 504 bp, Oryza sativa
  Clone ID: uC-osroM202032h10b1
cgcacccacaccttattttcctgcttgccagcgtagggcgcgccaaccccaacctcttcccctctacaaatctcctactgacccggccccgtgcttcttcgaccagggcacccgcactggtgcgggattggactcacagattctagggtttcgcccctcgcggcgattccaccacccaaggtttgcgttccttctgttggtgcatacacgactccacctatcaccgttatgttctcgctgagcaatgcatagaagctgcactcacgaggcttcatctcctatgcttgtaccagtatactaaacaatggccaaacttccaatagttggtcgtagtgcacctcgcaaacccaacgaaagcatgaggctttttgtagtaacagatattggggtgatgttaggtttctttattggaatttcgttcccagcagtttgcatacaaagctcaacttcccatctagtattgtttggtcatagaagacaagacctagcattgacagcttaagc

SEQ ID NO: 43190 - DNA, 530 bp, Oryza sativa
  unsure (1)..(530): unsure at all n locations
  Clone ID: uC-osroM202032h12b1
attagctatagcagcttaattagcttaagcacaaaaggtacagtaagcctaagctagctacacactaagcaagcttattagccatggcttcatcaccaagtctgccattggtgacgtgtgccctgctgctgctgctggccgtggcatgccaggctcacccttactggccactggagttggcgtactaccgcgacaagtgcccccaggccgaggccgtcgtcaaggccgtcgtcggggaggccgtccgccagaaccccggcaatggcgccgccgtcatccgcatgctcttccacgactgctttgtcgagggttgtgatgcttcgatcctcctggacccgacgccgttcaacccgacgccagagaagctgagcgcgccgaacaacccgtccatgcggggcttcgacctcatcgacgcgatcaagcacgccgtggaggcngcgtgccgggcgtcgtctcgtgcgccgacatcatcgccttcgcggcgcgcgacgccacctacttnctcagcggcgggaaggtctacttcgaca

SEQ ID NO: 43191 - DNA, 402 bp, Oryza sativa
  Clone ID: uC-osroM202033a04b1
gacaccttcaataacttgcaaggataactcaaactacttgaatcagatcagacaaaaacatcataagaatatcacgatgtgtggaggagcactgatcccgaacgactatggcgacaagccgccgccagcgacgtcggagtcgtcggagtgggacgccacaacgaatgatgaagaagaagaagaagcgtggtggcggaggcgactacgactgggaggtcgccttgctggagttcatgggtgaccacggcgactacgacatacgtggaacatccatgtcatcttcctcggcagtgacgtaagactctacagagggatagcttctgcgagtgtgctatcaataccaatcattggatcccatgcttccatcagatatacgggttgtagctttcacttcagctacca

SEQ ID NO: 43192 - DNA, 289 bp, Oryza sativa
  Clone ID: uC-osroM202033a05b1
agggcccgaacggccgggtgctctacggccgcagcatcaccgtcaatgaggcccagtcccgccgctccggcggcggaggcggaggctacggcggcggcggtggcggctacggcggcggtcgcggaggcggcggctaccgaggaggtggcggcggcggctacaggcgccgtgagggcggctacggtggcggcggcggctacggcggcggccgtggcggcagcagcggcggctacggtggcagccgaggcggcgtctacagcggcgactccggcaggaactggaggaactg

SEQ ID NO: 43193 - DNA, 269 bp, Oryza sativa
  Clone ID: uC-osroM202033a06b1
gttttccttcgcgccgccgccgccgccgtcgaaggcgggggcgaacaccaagacgttctcgatctacaggtgggatcccgactcgccgtctaccaacccccacctaagggactaccaggtgcaccttgtacgctgtggtccgatggtgcttgacctgctggtcaagactgagaacgacgaggatccggctgtcgaactacacctgatttagcgtcagaaccgccgagagctacggcgccatgaacatagaacaaggtgatcgcgaccga

SEQ ID NO: 43194 - DNA, 524 bp, Oryza sativa
  Clone ID: uC-osroM202033a07b1
gcgcctcctccgagctcactgacaggtgggccccctccctcctccgagtcctcgccgtcgccgccgttgcctgctccgacctgacggacggagaggcggctggggctcgatcggacgccgccgccacgggaggccggaggaggggaggcacggcgaccggcgaccggccacgggtgggtgggtgcatgtcgacggccgccgcgtcagccgcgcgcggtaggtagatgaaattaaggaacacagcaataacacgagctaactcagcctgtcttccaatggaggattgtgttggtatcaagtacagcagtgtcaatgagggcgaagagcgtaagggaggccatggcgttccaaaggtttccatcatcccactcattgtcctcatattctatgaagtttctgggggtccgattgggattgaggatagcgtcaaggctgctagcccactcctaacactggctgatttttgctgtttgcactcatatggagtgccccggaagcctgttactgcaagatggccccatgtt

SEQ ID NO: 43195 - DNA, 455 bp, Oryza sativa
  Clone ID: uC-osroM202033a09b1
ccttttctaaatcacatagtgctaaacccgccccctcttaattatatctccacttagcaaggtgtgtggttgcgagcttaaaacgcacccacgcagggccatggcgaccgatggcggcgtgttgcagctgcacccctacgccatggccgcggctgccgtggcattggcttcggcgtacatggtgtggttctgggcgctgtcgcggcggctgtccgggccacggatgtggccgctcgtcggcagcctacccagcgtcgtgctgaaccgggcgcgggtgcacgactggatcgccgacaacctgcgcgccacgggtgacgccgcgacgtaccagacgtgcatcctgcctctgccattcctggcgcggcggcaggtgctggtgacggtgacgtgcaacccgctgaaccttgagcacatactgggcgcgcgctttgacaactacctcaaggtgcccatgt

SEQ ID NO: 43196 - DNA, 413 bp, Oryza sativa
  Clone ID: uC-osroM202033a10b1
gcttcacttacgcctgcactagctgctgaagccaacatgttaagggagagatttgctcatcggtatcacagtggctccctttttggcatgaactccaggggcaggagaggtgagtcctctcgacgtggtgacataattggttcaggtcttgatagaaatgctggtgattcttctcgacaaccaactagcaagccaattgaaacggaaggatctcctcttgttgacaaggatgctcttaaagctcttattaggctactccgggttggtcagcctctatacaaaggtcaattgcagaggcttctcttgaacctttgtgctcatagggaaagcagaaagtccttggctcacattctagtggacatgcttatgctttgatctgcagggctcttctagaaatcaattgatgcaactga

SEQ ID NO: 43197 - DNA, 336 bp, Oryza sativa
  Clone ID: uC-osroM202033a11b1
ctttattatcggctttcttaataggagctgtatatggacaaccaggagctgttacttggtatgtatatgattgtagctctacctacaacagtctagagtacaatttttgccacttatctctggacactggatattactggcaacaaaatctctatctcattgattccagcaatttacaaacagtttgtgcacctgtagttaaaaccgttaatctcgaattgaacgtttgacgcaatgttaaatccaaatttgctagttgtactggtgatagtccaattaatatggtttctgctgatggttaaacttgcacttctttaggagatttgagagttacca

SEQ ID NO: 43198 - DNA, 236 bp, Oryza sativa
  Clone ID: uC-osroM202033a12b1
gttttccttcgcgccgccgccgccgccgtcgaaggcgggggcgaacaccaagacgttctcgatctacaggtgggatcccgactggccgtcaaccaacccccacctaagggactaccaggtgcaccttgtcacgcggtggtccgagagcccttgcccggctcgacaaggatgctgccgacggggatcccgctggcgaactacaccagcttcaacgtctaaaccgtctgaagctacgg

SEQ ID NO: 43199 - DNA, 386 bp, Oryza sativa
  Clone ID: uC-osroM202033b04b1
gtgctgcccaccttctttatcgttctgctttttttttctttctttctctggacaattgtatccagtcattcttttctacgcgaatcgatttcgctcacattcattgtcactctcactctctagttgttcctacgtggactatctacactctttctcccgacattgattgtccttgagattcttatcaactttcgctcaatatgcatggaatgaacaagctcgctctggcactggctgccgctgtggctgctgtcggtgaagccaaccttcacgatatgcatgctcgtcacccccatccctctggtctgccccagaccctcactcagacccgttgttcccgagcctgtcccaactccttctgagacttccttcgagaccccctttga

SEQ ID NO: 43200 - DNA, 535 bp, Oryza sativa
  Clone ID: uC-osroM202033b07b1
gtctcgcccttttttgtttgttttttcaatgactatgctcatttggatacattgcaaaatcactatagttaatgattccgctcattttggatacacaacttctcgaatatgctatattctcacgacattacatccgagttggctttcttacagttacagtttccaagcaaattgttgataggttacaacttacaagcaaaagacagctggggaaacagacaacatgtccactctctaccagcagagtgtgcagagtttctaatctggcaaggcagtccccctttcaagattgttcttgatctcaagagtatacttgccaaatgccctctcaaccttcttgttgaagtgttcgttccggtcattgatcgagtcaatgtccttgtcttcatggaacttgcgcctcctgctgaatgctttcccgtttctcatccccgttccttaagctcattaaccatcctgtctatgttttctttcgggaccttagacacctttccatattggagacttgaagcgtcccgattaaataaggatcggt

SEQ ID NO: 43201 - DNA, 429 bp, Oryza sativa
  unsure (1)..(429): unsure at all n locations
  Clone ID: uC-osroM202033b11b1
ccttgtcgaggtgaaccccaagatgagggccatcctggcagactggatcatcgatgtgcactacaaattcgagctgatgccggagaccctctacctcaccatgtacgtcatcgaccggtacctctcgctgcagcccgtgctgcgcagggagctgcagctcgtcggcgtcgcggccatgctcatcgcctccaagtacgaggagatgtgggcgccggaggttcaggacctcatgcacgtctgtgacaacgcctactcgcggcagcatatcctcgccatggagaagaacatcttgaacaggctgcagtggaacattaccgttcccacaccttacgtcttcttgcttncggttcatcaaggccgtccgaggcgacaaggagcttggagaacatggggtccttcttctgtgagatggcgctgaaggagtacggc

SEQ ID NO: 43202 - DNA, 239 bp, Oryza sativa
  Clone ID: uC-osroM202033c02b1
ctcagtctaataaacccctcgagaagacaagtgtaatcgccaggggaagcgcgcgagatggacgcagctggcgtcgccgcaaagccgtcgctgtcgaggaagccctcgccgtcgttccgcctccggaacggcagcctgaacgcgctgcggctgcgcagggtgttcgacctgttcgaccgcaacggcgacggcgagatcacgctcgacgagatggcgtccgcgctcgacgcgctcggctc

SEQ ID NO: 43203 - DNA, 157 bp, Oryza sativa
  Clone ID: uC-osroM202033c07b1
ccaagctccaaccatggcgactaggccggagcggaggctgattcttaaagggaagtatctactccaacgcgagcaatgacacctacggatcaggaggacggcagcagcagcagaagaagcagcaggatgaagcggccgccgctggagacaagacgtt

SEQ ID NO: 43204 - DNA, 255 bp, Oryza sativa
  Clone ID: uC-osroM202033c09b1
gtgagagagtgtgagtgtgagatcacaactactgtagtgtttgtgtgtgcgtgggatgatggggacggaggctacggcgacgacgacggtgagcggcggcagtggcagggcggcgccggcagcgctgtgcctgcaggcggcgcgcggcgcgtggtcgcggacgagcaaggtgctcgacgtctacgccgcgtcggccacggaggcgccgtcgatcgggtcctccgtcggcgtgccgttcctctgggaggaggcgcc

SEQ ID NO: 43205 - DNA, 245 bp, Oryza sativa
  Clone ID: uC-osroM202033c10b1
ctttgtatctccacctcctcctgcacgatctgcggtcaagcagagcacaagcgtgtgctagctctcccggtggcttgcctcgccggcgacggcgcggcgcatgatggagccgcgggtgttgatggctctcgcgctggtggtggtggcggcggtcgtgccggcggtgtaatggccctaccatacccaggactgtgttgattctcacgagctgatggattccgtgatccactgagcaaggtgcacta

SEQ ID NO: 43206 - DNA, 327 bp, Oryza sativa
  Clone ID: uC-osroM202033c11b1
cttcttgcattctcttctagccttagcctagctagctagctttgttgtctagctctgatcgaggttggtggtgatcatggcgtcgtcgagggtgatcctagcgctgctgctcgcggcggcggcggtgatggcgtcgtcggcgcagctggacgagaagttctacagcaattcgtgccccagcgtggaggccgtcgtccggaaggagatggtgcgcgcgctcggcgccgcgcccagtctcgccggcccgctcctcaggatgcacttccacgactgcttcgtcaggggttgcgacggctcggtgctgctcgactcggtcggaaacagcac

SEQ ID NO: 43207 - DNA, 392 bp, Oryza sativa
  Clone ID: uC-osroM202033d01b1
gcgctaagtaggaaaaaaaaaggaggaaaagaaaagaggaggaaagcgaagaggttggagagagacgctcgtctccacgtcgccgccatggccgcccgcgccgccgccgccgcgttcctgctgctgctcatcgtcggcgcggccaccgcggcgccggacatgtcgatcatctcctacaacgcggagcacggggcgcgggggctggaggaggggcccacggaggccgaggcgcgcgccgcgtacgacctctggctcgccgagaacggcggcggctcgcccaacgcgctcggcggcgagcacgagcgccggttcctcgtgttctgggacaacctcaagttcgtcgacgcccacaacgcccgcgccgaccagcgcggcgggttccgccttgggat

SEQ ID NO: 43208 - DNA, 445 bp, Oryza sativa
  Clone ID: uC-osroM202033d02b1
tctaattcccccttccgccgccgcccccaaacctcaacccgccgccgccgccgacgccgccggcgagatggcgctgtacctgctcttcgagtcggcgtccggctacggcctgttacacgcctacggcatcgacgagatcggacagagcgtggacgccgtccgcgcctccgtcgtcgacctcgaccgcttcggcaaggccgtgaagctcgccggcttcacccccttcttctgcgccgtggacgccctcaaccagtgcaacgccatctgcgaagggatcatgaccgacgagctgaggagcttcctggagctgaacctgcccaagcccaaggaggggaagaaggccaagtacagcctcggcgtcgtcgagcccaaggtcggctcccacatctccgaggtcaccggcatcccgtgccagagcaacgagttcgtccaggagcttctccgc

SEQ ID NO: 43209 - DNA, 471 bp, Oryza sativa
  Clone ID: uC-osroM202033d04b1
tcggtactttgctgctgttggttgcaggtggagctccggtgatcgacgccgcgatgtccaggtctggggccatggatcttgcatctggactcggggggaagatcaccaaggatgaggtcaagtcggctgtcgatgagtatgagaaataccatggatactatggaggaaaagaagaagcaagaaagtccaactacacagacatggttaataaatactatgatcttgccaccagcttctatgagtatggttggggtgaatccttccactttgctcacagatggaatggagaatccctacgtgaaagcattaagcgacatgagcacttttttgcccttcagcttggagtgaaaccaggaatgaaggttttggaccgcggttgtggaataggcggaccactaagagaaattggcaatttagcttggctttagtcactggattgaccaacatgagtcccagatactaggggaaagg

SEQ ID NO: 43210 - DNA, 343 bp, Oryza sativa
  Clone ID: uC-osroM202033d05b1
gttcaactttgcgtcccatgcggcggacgcgtcagacggcgttcctgaagcgtaccgaggccgagcccacgatctgatcgacggcgggtgccaaggcctgctagaccttggacacggggactgcggtcttgtcggccggccgctacgaggaggcggcgcggcacttcactgacgccatcgcgctcgccccggggaaccacgtcctatactccaaccgctccgtcgcgctcgccttggtccaccgctactccgaggcgctcgccgacgccgagaagaccgtctagctgaagcccgactgggctaaagtggtctcccgccttggagtcgcccacctggacttccg

SEQ ID NO: 43211 - DNA, 434 bp, Oryza sativa
  Clone ID: uC-osroM202033d07b1
attctcctgctcctcctccctgatcttccctctctcgctgccgctcctcttctcgccggccgcctcagcctgcggcgagctcttcgtccagccagtgcacccgaggagcttaggccggatcctgggatccgtaggagaaaccttgctcgggttccggagaatgtgaccggagcaaccgcggcttcaaatcagaaaaggctacagcaggggagcaacaggggcggtggtggcgcgcggcagcagcagcaccaggccggccaatggcgcagttgccatcaatgctgccgcgccggcggctggctcggcgccggcggaggtggccagattccactcccaaccaccacaacaggataggcagagtagatgggctggctgtttttctgccttgtcatgtttccggatcacagaaggtgggaaaacgaatagtttctgca

SEQ ID NO: 43212 - DNA, 151 bp, Oryza sativa
  Clone ID: uC-osroM202033d08b1
gttcaacttcgtgacccaggtggtggacgtctcgccggagtccatcgcgcggatcaaggaggacttcagcgcctccccgacgggcggcggccaggcctgctccaccttcgacgccgtgaccgccgtggtgttcaggtcccacgacccacac

SEQ ID NO: 43213 - DNA, 350 bp, Oryza sativa
  Clone ID: uC-osroM202033d10b1
cctaaccccccttccgccgccgcccccaaacctcaacccgccgccgccgccgacgccgccggcgagatggcgctgtacctgctcttcgagtcggcgtccggctacggcctcttccacgcctacggcatcgacgagatcgggcagagcgtggacgccgtccgcgcctccgtcgtcgacctcgaccgcttcggcaaggccgtcaagctcgccgccttcacccccttctcctccgccgtggacgccctcaaccagtgcaacgccatctccgaagggatcatgaccgacgagctgaggagcttcctggagctgaacctgcccaagcccaaggaggggaaagaaggccaagtaca

SEQ ID NO: 43214 - DNA, 180 bp, Oryza sativa
  Clone ID: uC-osroM202033d11b1
cttctctcctctcgtctcgcgtgagtactcgcgacctcaccgtcggcggcgacgagcggcggcggcggcggttgaggaaggaaggtggagggagagcacgacacgcggatgctgttcaaggcgtgctcgctcgtggcctgctccctccctggctgctcatcctccgctgtccctaccatc

SEQ ID NO: 43215 - DNA, 306 bp, Oryza sativa
  Clone ID: uC-osroM202033e02b1
ctcagggtggccccgctcatgggccccctcccgggcatcctggcgcacctccacctccaccccccggtgcagggcccccagaaggtgcacctcccggcatgatgcaccagggggtcccgtctggtggagcgcagcagggtggcagcggcaaggtgctgaccatggctgagctggagaacatgatgtctgtcagtaggccacctcctggcatgcctccaccaggcatgccctcaccacccggcatgggcttccctgcaccacccgcaggtggttctggaggagggtcccctgacaagcgtgctgacc

SEQ ID NO: 43216 - DNA, 316 bp, Oryza sativa
  Clone ID: uC-osroM202033e05b1
gcaggaagacgtcgacggagaagaagaggcatcagattagggtgagctcgacgggaggggtggagaatccaccggtagatgatggccatagctggagaaagtatgggcagaaagagattcttggagccaagcacccaaggttggtatttttctgatttccctctactttttccccccaatattttagtacaaaaaaggagtttgtttccacctttttcatagcctaatctgcacatgcgttttttataagctttgtgctgtggcatcatcaaagatatatctgctttggtttccctgcttggttggatgattgagg

SEQ ID NO: 43217 - DNA, 303 bp, Oryza sativa
  Clone ID: uC-osroM202033e06b1
tcgcccgcctccattttaccaccaccccctcctcctcctcgcaccacctccaccacctccgccaccgccatggccgccgccgccgtccatgtcctgcttttgctgctgcctctcgctaccatcacatccgcgtcgtcggcgccgctcccgctgctcgcgctgctgtcgctgaggtcgtcgctgggcgaccccgccggcgcgctgcggtcgtggacgtacgccgcggcggcgtccgcgggcgccaccaggtctctggcgccgccgtggtgcgcgtggcccggggtggcgtgcgacagggcaacg

SEQ ID NO: 43218 - DNA, 242 bp, Oryza sativa
  Clone ID: uC-osroM202033e09b1
ctattctttctcactcggctcttgcaactcgatcctgtctgacatccgacgccgctgccccagccccagctcttcatttcatgacggatgcactcgaagttactgacaaaaggtcacagagcgtaccacacacttcgggacacacattggacgatcataacacacacattagatatctaaaggtccactataatacacaatgcctgagaacagcaacattagcatcagcaactatttccatt

SEQ ID NO: 43219 - DNA, 97 bp, Oryza sativa
  Clone ID: uC-osroM202033e12b1
gtgtccttgaagctgtgtaaagaccagtatacccttcatccccaaaagccccaaaccctatgaggcgagtggaggaggaggaggtgcttgttagcgg

SEQ ID NO: 43220 - DNA, 239 bp, Oryza sativa
  Clone ID: uC-osroM202033f03b1
gacaagaaagatttcagaatctttggatggggatctgtgcatgttcagagcagctggagcatgttcatgagacagatgagagcattgtgtatgtgaaggatgagcaaggaagggggggtagggggaggtggaccacaaccacctcgaataaggccaaggccaccttacactcgtgcctgagccggtggtagagaaacttgaaccccacctccgcgccggtcacgtgcaaccggtcgtcc

SEQ ID NO: 43221 - DNA, 242 bp, Oryza sativa
  Clone ID: uC-osroM202033f04b1
ccttcatctccactccacctcacacgcctcatcgacctcccaagaaccaccaccgccttctcccatggccgccgccaccgtctccgtccgcttccacccggccgcatccgccgcgcgctgcggcggcggctcgcgccggagcaggcgcctgtccggggtcatcagggcgcagtcggcgccggcttcggcggcggcggcggcgctgacgcaggacgacctgaagaggctggcggcggtgcgcg

SEQ ID NO: 43222 - DNA, 404 bp, Oryza sativa
  Clone ID: uC-osroM202033f05b1
ctatccttcttctctgtctttcgttcaggatggcagagtcttttctgatggtgccgaagaccaccaccgcaatattgtcggcgaacggtgccatgaacaaggaggacccggtcaactggaacgcggccttctccgacatgcgctacaaggaggttgaccaggagtagagtatggcgatgcagctccgcgagccgaatgacaagatctagtgcaaccgcttccgcgtgctccacttggtccaccgctactacgaggaggtcgccgacggcgtgaacaccgagctgctaaaggccgactgtcctaaggtgtactccagcctcgagggcatccatatgcatttgggccacggcggcgacatctacggcgtcaccaccggctgttgtggcacctaccaccgtcgtacc

SEQ ID NO: 43223 - DNA, 451 bp, Oryza sativa
  Clone ID: uC-osroM202033f06b1
ccctctctctccctcttgttctctccgcttctccgcccacctcacctcgccgccgccgccgccgtcgccgccgcggcgcaggcagcggagctcggcgcgcctcggccgcgccgtcgtctaccgtgcgggcgccgctcccgcgtcgcgcctcgcgcgcgcgcgcgagcgcgagctaccctcctctctgtgcatctggcgacgactcggtaaggtaggggttgtgcgccgtccatgcgcgcggttccctcgtggccactgcctcccgctcgccgtgtcctctgccacgggcgcgggtaccctcccatccggcggagttggagagtcgtgcctagggggaatctcagctgtcgggcacccgatctaccctccaaggagttggtctatgaccgggaatagctctctttgtgagataaaactaaaaggtcccttgacgctggaagggtctgctgga

SEQ ID NO: 43224 - DNA, 355 bp, Oryza sativa
  Clone ID: uC-osroM202033f08b1
tttccttctcctccggctcttcttcagtatcgaatcctctcttctcctcgtgcccaccaccaccaccgtagcaatggcgggcaacgggccgatcaacaaggaggacccgctcaactggggcgcggcggcggccgagatggccggcagccacctcgacgaggtgaagcgcatggtggcgcagttccgcgagccgctggtcaagatccagggcgccaccctccgcgtcggccaggtggccgccgtcgcccaggccaaggacgccgccggcgtttccgtcgagctcgacgaggaggcccgcccccgcgtcaaggccagcagcgagtggatcctcaactgcatcggccacgggggggac

SEQ ID NO: 43225 - DNA, 366 bp, Oryza sativa
  Clone ID: uC-osroM202033f12b1
cacgttttggccatggatctgcaaagcttgctcgtcaagctcagagcaaagagaaaactcttgctaagatggaacgaggtgggctcactgagaaggttgtcagggacaaggtactggtgttccgctttacagatgttggcaaacttccaccaccagtgctgcagtttgttgaagtctcattcgggtataccccagataacctcatctacaagaatctcgactttggtgttgatcttgactctagaatcgcactggctggccccaatggtgcggacaagagtactcttctgaagctcatgacaggtgacctagctccattagatggtatggtcaggcgccacaaccacctttgaattgggtagtatc

SEQ ID NO: 43226 - DNA, 421 bp, Oryza sativa
  Clone ID: uC-osroM202033g02b1
atatccttcttgcagattatattgatgatgatagacagttgcctagcaggttagcaaaaacaaaaattgtgaaaggcaattcttcccattggaaggatggggacatttcatcacagacaggatcatcgctttctttattaaggatgatggataaatatgccagattaatgcaaaagctggaaattgtcaatgttgagctttttaagggtatatgccaactgtttggcattttttatcactacatatacgagacatttgggaaccaggacaggggtcaaagtggcaagtctttacctgatcatcaatcgtttcggcttagagaggctttgtcaaaaataacacaagactctgaccagtggatcaaaccacagagtatttcatatttacctttattacccgtttaatggatgtgatgcctact

SEQ ID NO: 43227 - DNA, 395 bp, Oryza sativa
  Clone ID: uC-osroM202033g03b1
tcgcttctctgtttcgcggagacgcgcacgtcctgagccctgcctgcgctcggtcggccatcgagccaggtgggctctttggacacccggtgatggatcacgcggagctgaccaccgggcaggttctcgagaggggtattccatggggatgatacatggcaaataagctgatttccgggacatgccttcagcttttgcgacggtatgaccacacaccagaaagccaacgaggtcctttggttgatgaggatgggccattctatgttcgagtgttcctgaatatcttgcggaacatctgccaggaagatacctgtgaatatgtgcttgccctgattgatgagatgcttgcagtaaatactaaacgagcagcactgttctatgataactctctctct

SEQ ID NO: 43228 - DNA, 434 bp, Oryza sativa
  Clone ID: uC-osroM202033g05b1
cctcatgcatctcaacgccggaatcttcggcactggctccgatggccacacgctgccgtcggagacggtgcgggcggccatgctcgtgcgcatcaacaccctcctccagggctactccggcatccggttcgagatcctggaggccatcaccaagctgctcaacaccggcgtcacgccgtgcctgccgctccgtggcaccatcaccgtgtccggtgacctggttcccctgtcctacattgccggcctcatcaccggccgccccaacgcgcaggccatctcgcccgacggaggaaggtgggacgccgccgaggcgtttaagctcgccggatcgagggtggctttttcacgctgcacccaagggaaggtcttgccatcgtcaatgcacgtccgtggtggcggtgcttgcgggcccgtgatggtcgacgccaacatcc

SEQ ID NO: 43229 - DNA, 445 bp, Oryza sativa
  Clone ID: uC-osroM202033g07b1
tggctcggcacgcctgaccgaccggaactgcacttgccggctccacgcatgcgatcagtttttggcttgctatgctatggttgcttgttgcagtggttttgccacggggaagggtcaccgggaaattattgtttaggctgacgtgatgctccagggagtcctgtcgtgagctcccggcgccgactcggcagcgatgaaggcgaagcgcgcggccgacgaccaggaggaaggctgttagcgggagcgcgcgcgtgggaagcggctggctgctgaggggaagcatgggttagtggtggtgagtacgggggaggaggaggttaccactacttgaattaacttctgttctgtcataaacagtttatcaacatgggaatttaccttagtacccgcaaaaccgataagttctctgaagacggtgaaaatgataagcttaaacttggttttt

SEQ ID NO: 43230 - DNA, 377 bp, Oryza sativa
  Clone ID: uC-osroM202033g08b1
atgcgcttgcttctcagctttgccgagacctggttgcctcaagccgtgttgcgtgctgcatgctctgaattgaagaactctcttgagcctgaccaggtatatcagaagtggagaagaagattggaagcatgagggaaatgggagagaagaggaggcgtggacaccttaaccctgctggttttgcaggagggttgcatgatcatgaggtgaagaagaacgaggagcataagctagacatgagtggcatgtccatggatgcccttccacacctcaccatgtgtcttggtcaagtcaccatcttggatctctctaacaacaatcttgagagcatcccggagtcaataatcgctcggctgctgaacgtggtggagctggac

SEQ ID NO: 43231 - DNA, 448 bp, Oryza sativa
  Clone ID: uC-osroM202033g09b1
gctcttctccttgtcgctcgcttcgcccgcataagattagtcactaagctggctcggccatcgccgccgacggcgtttgcttacaccgggcgatgcatgacgcggatctagagattccgcgtggagagcccgcacgtgcggtacggcacggaggaaagcgagttggactaccattacgaccatgcatgaatgtttcgcgacggtatgaccacaaaccagaaaggcaacagaggcccccaggttgatgaggaagagccatcatatgatcgagtgcgcccgcatgcttggagtgacacttgcagggcggatactgatcaacggatcatcgctcacagcggggataatcttgaacaggaagggaaatcaatggccgaccaaggacatggtgcagcatgtgaagtactctggttcaatcacctaggagatcaagatcagggtcgtgagctac

SEQ ID NO: 43232 - DNA, 334 bp, Oryza sativa
  Clone ID: uC-osroM202033g11b1
atcaagcagcttttgatcgcctctttggtctcaattgccatcttggccgtctactactcggccaacgagaacaagatcgacgccttcgaagagtggaaggcccagtacggtgccaacttcgccgctgaggaggaggcctacagaagactcatcttcgagaagaacctcgtcaagatcaacaagcacaacgctgatgccagccagacctacaagatgggagtcaaccaggtcaccatctacaccactgaggagttcggcaccagattccttacccccatgccccaggtcggtttgacccagaacaccgaagtcaaccacgagatgaacatcgttg

SEQ ID NO: 43233 - DNA, 339 bp, Oryza sativa
  Clone ID: uC-osroM202033g12b1
cttaatacacgagaaatacgatttccatctgattgcgacttgagccatggctgcattgacttatgcagaaagttactgcgaatcaattcagtggaacgccttaccgttgaagagtttgtgaaccatccatttctcgctgaacatgctttggagagaaccttgagccggacaccatcggacataagagatggctttccattcattaatagcagtcctacgagaccttcaagccaaagttctcaggaagattgtatgccttttcctttggatgatgagtcaactggacaggatgaaggtcctgtttttgatagtaagagtgcaataaaatcctatgggttt

SEQ ID NO: 43234 - DNA, 324 bp, Oryza sativa
  Clone ID: uC-osroM202033h01b1
atcaggttctgtcttgcatatgctatgcctgcttgttggaccggttttgccacacagaagggtcaccggctaattattgttttggctgactctactctgcacggagcaactgtggtgtggtcccggaacctacgcgacaaggttaaatgagattcgcccatgcaacaactactggtgacaggaggggcggtgagccgcccctggaaaggcgttaccctgatgcagaaagcaagggtgctcaaggactgcgtactgcgagtgaccaccatcaagattgacccatacctcaacactgatgctggaaccatgtcttcgttcgagcat

SEQ ID NO: 43235 - DNA, 440 bp, Oryza sativa
  Clone ID: uC-osroM202033h02b1
gtttgttccgtacatgtactcgcactgcagatgtggcgatgtgtcaagcactgcgcagcacacagctcgcggtctgtctgccagctattgcttactactgaccaggctggtcttgccgagaaaacatatcccaagaggtaatttgaggtcctaccatgactaacactgctggggacaggaggattggtcagcagccctcggcaagatcaagaccgcgagcagcaccggcgtggagctcaaggcctgcgggctctgggtcaccaccatcaagattgacccatacctcaacactgatgctggaaccatgtctccgttcgagcatggtgaggtcttcgttttggacgatggtggagaggtggacttggaccttggaaattacaaacgttttttgggacataaaattgacctgtgataacaacataaccacggaaaaaatatat

SEQ ID NO: 43236 - DNA, 556 bp, Oryza sativa
  Clone ID: uC-osroM202033h05b1
agcgaaactgaagggtgatgagaaaagcctgcatggtctcgcccccgggtactcgcaactggaagaatttgattgaagacggtctcaggaatgaggaaccgctgtctcaggcggaaaagtgacgacaagatggatgacagggaagaaagcccgagataggccgcctgcctatctattgagggccgctgcatgcctctcaggaggtagattctcaggaaaatcatgaaactgtgcaagaagatgagagcaaggcagctgaacatcatgatggacatgccacgagccatgaccatcacacaccagaaagggagtcatctgttgagcagcatgatcctgaaagccaagatgacattagcataaaagccgcacctgctgctgaatcaccaccagaggagacatctgcagcacctactaaagagcaggaatccactcctgctgactcagaaggtttatcaagagaggagttaggccgtctggcagcttccagatggactggagaaaaggttgctgaggtcagtaaagatgataaaatgagcatgaagctgagcatgatatg

SEQ ID NO: 43237 - DNA, 570 bp, Oryza sativa
  Clone ID: uC-osroM202033h10b1
agttagcgaaactgaagggtgaagagaaaatactacaaggccttgttgacaagctcacagaacaaaagaaattgatagagaaggcagaggaagaggaacgcttaagaaaagaaaaggaagaaaagaggatgaaggaagaagccgaaaagcaagctgctgatgaaaagaaagcgtcagatgcctctcaggaggtagattctcaggaaaatcatgaaactgtgcaagaagatgagagcaaggtagctgaacatcatgatggacatgccacgagccatgacaatcacacaccagaaagcgagtcatctgttgagcagcatgatcctgaaagccaagatgacattagcataaaagccgcacctgctgatgaatcaccaccagaggagacatctgcagcacctactaaagagcaggaatccactcctgctgactcagaaggtttatcaagagaggagttaggtcgtctggtagctttcagatggactggagaaaaggttgatgaggtcagtaaagatgataaaaatgagcatgaagctgagcatgatatgccaggacattcagaagaaacacatg

SEQ ID NO: 43238 - DNA, 184 bp, Oryza sativa
  Clone ID: uC-osroM202033h11b1
atttgttcagagctaggtatagattgctcggttgaaggaggggctgtgccacggcgactggccaccgaagaactatcgttaaactggacaggagtatcaacagtgtcctcgagggagctaaccgtgcgggatcagcaagaataaaggtccagcgcacagctatctccgaggaacatggcagaac

SEQ ID NO: 43239 - DNA, 149 bp, Oryza sativa
  Clone ID: uC-osroM202033h12b1
gtctgtgcagagcgacgcgaagctgtggtcgttcaaggtgctacccggccccggcgacaagccgatgatcggcgtgcaatgcatgggagaggcgaaggggccgcttggcgaggtgatgctaagcatagtgctcaaccagatgaatgata

SEQ ID NO: 43240 - DNA, 505 bp, Oryza sativa
  Clone ID: uC-osroM202034a02b1
tttcattctcaagactctgacacaatcaattgctagccttctatactcattagcaagtgatgcaaggcttttcggaattgcactagttgagcgagtatggcgaccctggtggatgtgatttttgttctccaacatggtagatgaattaatgaatgactctccaagcctttcaactgaatccgctaaatattccaatgaatcactaagagatgctaacagtatcaatttctggtcatcatggatcaagttttcctgttttattgggcacatatccaataggagatcacttagttcaatctctacttctacagcttctgcatctggaatactgtggtcaagttgaccaaaagaattttgtaaagatagatttgctggatccaagcgcattaaactttcaacatcattccttgagaggagaatataactttgttttttaaggacagcctccatataggatgcacggcatctttcatgtgtacgttctaaaaatgtgcgaacatactca

SEQ ID NO: 43241 - DNA, 465 bp, Oryza sativa
  Clone ID: uC-osroM202034a03b1
gttattttagaaaaaagaaaacctgagctttcgatctcttcggagtggtttcttgttctttgaaaaagagggggattaatggcgacagccgggaaggtgatcaagtgcaaagcggcggtggcatgggaggccgggaagccgctgtcgatcgaggaggtggaggttgcgccgccgcaggccatggaggtccgcgtcaagatcctctacaccgccctctgccacaccgacgtctacttctgggaggccaaggggcaaacacctgttttccctaggatcttgggccatgaagctggaggcattgtggagagagtgggagagggtgtgaccgaactctcgccgggcgaccatgtactcccggtgttcaccggcgagtgcaaggagtgtgatcactgcaaatcggtggagagcaacatgtgtgacctcctcaggatcaacgtcgaccgcggcgtcatgatcggcgaccgc

SEQ ID NO: 43242 - DNA, 500 bp, Oryza sativa
  Clone ID: uC-osroM202034a04b1
gcccggccggactggctcgaccgacccacgcgtcctctttttactgtcactatcattttattctcctaaacgctatcactagcttctagctagctcaattaatgaatgagccacggcggaggagaagcaccaccaccacctgttccaccacaagaaggacgacgagccggccaccggagtagactcctacggcgagggcgtctacacgtcggagacggtgaccaccgaggtggtcgccggcggccaggacgagtacgagaggtacaagaaggaggagaagcagcacaagcacaagcagcacctcggcgaggccggcgccctcgccgccggcgccttcgccctgtatgagaagcacgaggcgaagaaggacccggagaacgcgcacaggcacaagatcacggaggagatcgcggacaccgcggcggtcggcgccggcggctacgcctttcacgagcaccacgagaagaagaaggaccacaagagcgcccaggagttcaccg

SEQ ID NO: 43243 - DNA, 378 bp, Oryza sativa
  Clone ID: uC-osroM202034a06b1
gttctatgttcacgagcgactgcccggtgccttcttcttcttcttcggcgagacccagctgcgattccaccatggcgcctgcttccgacgccaatgcgtcgcaagatcaaaactgcaactctgcaacgtgaagtgcagcactgatcgagtttccaggtgtgctactgctactagcgcagagagtgctgcacatcgatgtctgtacagcgctctctgctttgcgccaactgtacatgtaaatgggtttggagtttggagtgcaaattaatctgcgatcgtacggagaaattggaatgtgatcgccgattgtgtgttcgattgtgactaaccagagaagttaatttgatgttcaaggatagggatttcgatgagtaggcc

SEQ ID NO: 43244 - DNA, 461 bp, Oryza sativa
  Clone ID: uC-osroM202034a08b1
tttttttttatattgaaaacatgtaaaactgcgcttcttcttcatggattaaaaatctaaaaaaaaaattaataatttattattattttttattttgttttttaaatcttttgaaaagaatattgtcaaaagcctttacggggatacttcatttttttttttaaattttttttttttattttacaagagactaggcccctcttgttgggataaaaaaaaaaatttaaaaaaggttaaggaatgaagcgatatcataaaaagtttattcttctttttaccttgttatttatttttttttttttttaataaaaataactaacttttggtttgttattttttaattaaaaaaaaaaaaaaaaaaaaaaagggtaaaaataaaaaatttaattaacttaattaattcaattaatttaacttaattttaatattaaattaaataatttttaattaattaattaatt

SEQ ID NO: 43245 - DNA, 335 bp, Oryza sativa
  Clone ID: uC-osroM202034a10b1
ttcatggcgctctctctatctctatctcttccaaaaccctaaccctagcggcgggcgggagcggcggaggaggagggcgcggaggaggaggggtggtagcggtggtgggtggtatggaacacgcaatttttgaaaaggaagactctatactgtctttgaagtagatattggcttttgagatgtagtcctatctggggatgatttaaacacctattgttgtgatgactggattaactagtgatgttactgcttgtataccttggttgaaacttggatccctttacgagagcggaaatggtagaagtgtgatttaacctaaataaatgatggatcat

SEQ ID NO: 43246 - DNA, 518 bp, Oryza sativa
  Clone ID: uC-osroM202034b01b1
gactgttccgagagccctaaaccctagaactccctcgccctcgcgtcggcgccatggaggacgaggagatggagaagaaggtgcagcagtacctgcagcggaaggggttccgcctcaccgagctcgcgttgcaggaggagcgcaaccgcatctccacctcctccgtctccgacgtcgcgctcgccaggtcggaaaatgatccggcaagatactatgatggttatagtaaactaagaacatgggcatacagttctctcgatcagtacaagcatgaattactccgtgtcctttacccagtgtttatccattccttcatggatctagtggcagagggacatacacaggaagctcggtcctttttccacacgttccatgaagaccatgaactgatgcattctagggatctccagaaactggaaggcattctttctcctcacatttggaggaaatggaactggccagatctttaaggaaaaatcaattcagaattaagtatgtgagtattcatatgagttact

SEQ ID NO: 43247 - DNA, 542 bp, Oryza sativa
  Clone ID: uC-osroM202034b02b1
ttttgttccagttaggcggttaacttgtatatcaaacagacgccgcgcgcgcgagcagttcgtcgtcgtcttcgctcgatcgtagtagttgccggccggcatcggcatgggcgacggcggggagaagcaggcggcggcggcggaggggtggcggctgagcgtcaacgacttccagttgccggagcggcccaaggacccgcacttcgtcaagagggtcatcaagcgatgccacggaaagcatcggaaaattgcaaaatactacaagaagcaggaaaatctcctgaaggatttcagcgagatggaaaccatgaatgagattggttccttagatcagaatgctcctactgaggaagagttgaggcaaatggcaaagggcgaacgattggccatcaacctgtcgaatatcatcaatctgattcttttcattgggaaagttcttgcatcagttgaaagtttatcgatggcagtaatagcatcgacactggactccctactggatcttttgcaggtttcatactctgtttactgcacatgctatgaaa

SEQ ID NO: 43248 - DNA, 487 bp, Oryza sativa
  Clone ID: uC-osroM202034b03b1
gttttctttttattgtcacttccatctcattctcctaattgtcatcactagcttctagctagcttaattaattaattagccatggcggaggagaagcaccaccaccacctgttccaccacaagaaggacgacgagccggccaccggagtagactcctacggcgagggcgtctacacgtcggagacggtgaccaccgaggtggtcgccggcggccaggacgagtacgagaggtacaagaaggaggagaagcagcacaagcacaagcagcacctcggcgaggccggcgccctcgccgccggcgccttcgccctgtatgagaagcacgaggcgaagaaggacccggagaacgcgcacaggcacaagatcacggaggagatcgcggccacggcggcggtcggcgccggcggctacgccttccacgagcaccacgagaagaagaaggaccacaagagcgccgaggaagtcaccggcgagaagaagcaccacc

SEQ ID NO: 43249 - DNA, 369 bp, Oryza sativa
  Clone ID: uC-osroM202034b05b1
agggcatgaacggcaaggttgctttcggccgcaacatcaccgtcaatgaggcccagtcccgccgctccggcggcggaggcagaggctactgaggcggcggtggcggctacgcgagcagccgtggaggcggcggctacggaggaggtggctgtagcaggctaccgtcgctctgagggcggctacggcggcggcggaggctacggatggtgacgtgaccaccaccagaggcggctacggtggcagacgtggcggcggataccgccgccactcctgcgggaactggaggaactgattggaggggcccatcgcggacagctatccttagctatccgcgtcagaatcatcttatcatggagtcgagtcgatatc

SEQ ID NO: 43250 - DNA, 453 bp, Oryza sativa
  Clone ID: uC-osroM202034b06b1
gttctagatcgcgagcgtttgcttttcattgactgttttgtttctcatttgttgggttttatttttatcctgtggtgttttttttaaaacacatcaacattgttaagcaagagcagaatttggggataaaccccattacataaccaaggttaatatctgtaagcaaaagaaccacccctgagaagggggggttaactgaactaccaaatcaatttttctgaaaatacctaatatccaaaaaaggagcatgtcgattgggatctgcggtgaatcctcaacgactgttaccctgggcctcaaaagatgttcactctgcttgacaaacctgtaattcccatcagctgtgttcacggaaacggcacaagaccgaggtttgttgctgagccctaattttggtgggtgcattcactggactcagcgaaggatccccaagagggtaataatttatctggg

SEQ ID NO: 43251 - DNA, 528 bp, Oryza sativa
  Clone ID: uC-osroM202034b08b1
ttgtttataaaacttcgactattcatgctgttgataaagcaggtcacatgtaccggtcacagtcgcttcccatgaacatgaagaaattgaataatggaaagagcttcaagagaatgaattcactcggcggtgtctaccgcgtagttccttcgacaccatcagtccccgtgacaagcagcaatgtcatcccagatatagtcccatctgaaccaggtgatgaagatggagaggacatagcagaggaagaggcagtatgcaggatctgcatggttgagctgtcagaagggagtgacactctgaagctggagtgttcatgcaagggcgagctcgctctagctcacaagcactgcgccatgaagtggttcaccatgaaaggtaccaggacatgcgaggtctgcaaggaagatgttcagaacctccctgtcacccttgttcgtgttcagagcatgcagcagcctgagcttcagaccaaccctgccaacgcatcaagatacgatcgcctcaggatgtggcagggagcgccaattc

SEQ ID NO: 43252 - DNA, 507 bp, Oryza sativa
  Clone ID: uC-osroM202034b09b1
tttttgtttgcctcaaatttagaagaaaatgcggcctaatggtgaccaccacgacgccggcgaggcgtggcgaggtccggtgaggtgacgttgttgatgtcagccctgggcctcgatcggcgacatcatcgccgagaaccggcgcttctggatgcgcggcgggaggtgcttgttgtacctcttgggcccgaccgtccacggcaggaagacgccggtgccgctgcggctcatccgcttgttgccgccggcgggggccatcaccatcggcctcgccggcgcgggcgcggcgaccatcatgacgggcgccgcgcgcacggtcatgccccacgcaggcgccagcacggcctgcggcgccgggccgtagccgatgatggcgccgccgtgctgcggcttctgctgcatgccgggcgccgggatcggctgctgcttgtgcggcggccgcgcctgccacagcgtcatggccttggtgggcgactggaggcggctgaggtccaccggcgtcgacgg

SEQ ID NO: 43253 - DNA, 384 bp, Oryza sativa
  Clone ID: uC-osroM202034b10b1
tttggtaaaagccaaactgaattcccgacgcgtgcgcgcgcgcagatccgtcttctctccaatccgatcgctccgggcgcgcgggattcatgcggtctcactgccgcgcgctcccgccatgcagcaggggagttgtagcagcagcagcatcctggaggagggtttgactggcgcggggggtggttggtgtcgtgtgcggcaatggcgaccctgtcggactccgcgggcggtggcggcggtggccgggcgggcgccgagctgatggtgccgcagttccaccttaaggcgctgcacgccatcctcgccgtgcgcgcgccgcggacgttcgcggtcgcgcacgcgccggctgtgtcgttccggaggcgggacaggtggttccacctg

SEQ ID NO: 43254 - DNA, 447 bp, Oryza sativa
  Clone ID: uC-osroM202034b12b1
tttggttatcatgacttggagacatctgttgtcgatcatattagttttatccagtggggtactgggtagagatgtgattcagcaagatattggttttgtggttgaggctatcttgactgttcctgatccccctccctctccttctcctcaaccaagtcctgatgtagcaccaccacccaatcctgttcctaaccctattcctgtacctattcctgtacctattcctataagtgcacctcaacctaatcctaatcctactcctgtacctattcccataagtgcacctcaacctaatcctaattctaatcctgtacctgttctataaatacaccttaacctattcctactccaatacctgatccacagtcttgtaatgtaaatggttatgtctgtgataatgtagatcctatgagcaagtgtatgtgcataccaccacaacccaatgag

SEQ ID NO: 43255 - DNA, 465 bp, Oryza sativa
  Clone ID: uC-osroM202034c01b1
cgctctttcagagcaccggcgacaccgtcgtgttctggggccggaacacggaccagctcgaggggtccctccgtgaggcgtgcgacaccggcctctacaccaccgtcatcatctccttcctcagcgccttcggctacatcccgggcacctacaagctggacatctccggccacaccgtctccgccgtcggccccgacatcaagcactgccagtccaggggcatcctcgtcctcctcgccatcggcggccagggcggcgagtactccctgccgacctcccaggcggccgtcgacctcgaggactacctctggaacgccttcctcggcggcggccgccccggcgtcgcccgccccttcggcgacgccgtcgtcgacggcatcgacttcttcatcgaccagggcgccacggagcactacgacgagctggcgcggcggctgtacgcgcacaacaaggactacaagggga

SEQ ID NO: 43256 - DNA, 435 bp, Oryza sativa
  Clone ID: uC-osroM202034c02b1
atctttttcttcgccggccagggctccggcatggccttcagcaagctgaccggcggcggagcgacgacccccgccgggctgatcgcggcggcggtggcccacgccttcgccctgttcgtggcggtgtccgtcggcgccaacatctccggcggccacgtgaacccggccgtgaccttcggcgccttcgtcggcggcaacatcaccctgttccgcggcctcctctactggatcgcccagctcctgggctccaccgtggcgtgcttcctcctccgcttctccaccggcgggctcgccaccggcaccttcggcctgaccggcgtctccgtgtgggaggccctggtgctggagatcgtcatgaccttcggcctcgtctacaccgtgtacgccaccgccgttgaccccaagaagggcagcctcggcaccatcgcccccatc

SEQ ID NO: 43257 - DNA, 397 bp, Oryza sativa
  Clone ID: uC-osroM202034c04b1
ggcccggactgaccggctggacccacgcacgcggcttcttttatcacacttcccatcctagacttaacggacccatctagagtccccgcatcacagattccactccacgcaaaccctacgcctccttcgctcgctgaacactgggctcggttacccatccatggctggcatgaagttcttcgtcgtcctcaactggaaacgcaatgggacaggggaggacgcgacgaacatcgtccgacgctcaacgagatcctggtgccctccgaggacactggcaggagaacccgagcccgtccttacgttcctgccggagagacagggttgatccggccggacttctgacccggcccgcagaactgctggctgcgcaccgacttgtgcctacactggggagatc

SEQ ID NO: 43258 - DNA, 428 bp, Oryza sativa
  Clone ID: uC-osroM202034c05b1
ccctcattcgccacactcccatgtcccatccactctcctctcctctccggcggtgggtacaggcgatgacagcgtgcggcggcgtcctcctcctctattgccgctcgcggtgccggcttactctcccccaccgtttaccacgccgcctccgtctccgccgtcgccaggctcgggagcggcggatctgccgccgatagcgccggcttccgggccggcatccgtctccgccgctgctgggcacgggagcggtggatccgccgtcaccatccactcccccaccaccggcgatcccctctctatgcatgcctcacgccgtcgcataccctcccgatttccctctccaatgatggatggtttggtttggtttggtttggctgcttgcgagcagcttctggttgctgtgcgtgttcggatgtttctagtttctc

SEQ ID NO: 43259 - DNA, 459 bp, Oryza sativa
  Clone ID: uC-osroM202034c07b1
tggtttgagtcatgaagtgcaagtacgttgagctcactgcggattatgtgtacccctacagaaaccagggtggatttgatatgatctgcagtggtagggacaagattgaaacaccagagcagttcaagcaagctgaagacactgtaaacaaacttgatttggatgggcttgttgtcattggtggtgatgattcaaacacaaacgcatgccttcttgctgagtacttcagggggaagaacatgaaaactcgtgtcattggttgcccaaagactattgatggagatctgaaatgcaaggaggttccaacaagctttgggtttgacactgcttgcaagatatactctgaaatgattggtaatgttatgactgatgcacgctcaaccgggaagtactaccaatttgtgaggcttatgggacgtgctgcttttcacattacattggagtgtgctttgaaacaca

SEQ ID NO: 43260 - DNA, 396 bp, Oryza sativa
  Clone ID: uC-osroM202034c08b1
cctctcctcccttccaccacgacgcgaccgacgcggcggagaaacccgcgaagccgcagtccagccagcgaggggccgccagccgaagctgaagcgagagctagggtttgctccaccccttgaacccgcccgcgcccccgccgccacgaggccgatcgagggttctgcttctgaggctgtcaagcctggcggctaattgggatggaccttgtgggatcgctgctggtgaacatgactcacttggttgacacctcggggctccagttcttcggctggctcatcaccgccggctccttcggcctcgccgcgctcatctacgccctcctcaggctgcagagggcggcgtcgctgtactggatcaaggcggctgccagggagaagaaggcggcgtggaag

SEQ ID NO: 43261 - DNA, 404 bp, Oryza sativa
  Clone ID: uC-osroM202034c09b1
tcttaaatcacaaagcacaacaaaacctcattgcatctagctagcttttctgtctcctgaatttctgatcagccagcgaaaacccaacgcaagcttggtcaccatggggtttgcttcctgcgtcgccgtatgcctcgcgttcgccgttctcctcccttggcacgccacggcgacgtcgccgacgggcacgatacagcgggagacgaagcagcagatcctggccagcatcccgccgcactggcaggagaacccggtgctgttcctgacgtcgccgtcgggcaagtacacggcgtactttctgcgcagccagaccgcgccgggcgccggcggcctcggcgccgacttctgctacgtggaggtgctcgacaccttggatcccggctcggaagggccgaacgtgtggg

SEQ ID NO: 43262 - DNA, 406 bp, Oryza sativa
  Clone ID: uC-osroM202034c10b1
tttctttaatcacaaagcacaacaaaacctcattgcatctagctagcttttctgtctcctgaatttctgatcagccagcgaaaacccaacgcaagcttggtcaccatggggtttgcttcctgcgtcgccgtatgcctcgcgttcgccgttctcctcccttggcacgccacggcgacgtcgccgacgggcacgatacagcgggagacgaagcagcagatcctggccagcatcccgccgcactggcaggagaacccggtgctgttcctgacgtcgccgtcgggcaagtacacggcgtacttcctgcgcagccagaccgcgccgggcgccggcggcctcggcgccgacttctgctacgtggaggtgctcgacacctcggatcccggcgcggaggggcggagcgtgtggg

SEQ ID NO: 43263 - DNA, 398 bp, Oryza sativa
  Clone ID: uC-osroM202034c12b1
tctcatcataccgatttcgcagcgccagcccactgatgcctcaccgaattttttcattttttttctctctttccattctccccggcgatcgagtagccggcttctgctcgccgcccgcgcgccggagggaggcgaggtccaaagccggcgaggcgccatgcaccacgaccccaaccccttcgacgagggcgccgacgagaaccccttctccaatggaggaggtggtggagcacgtcgtggtggtggtggcggcggtggtggtggcggtggcggaggcaagtctcagttctcgttcgggttcggcggcctcggcggcggcggcagcaagggcggtgccactgtcgacatccccctcgacaacatgagcgattcgaagggcaaggggaaggagcctgtgc

SEQ ID NO: 43264 - DNA, 486 bp, Oryza sativa
  unsure (1)..(486): unsure at all n locations
  Clone ID: uC-osroM202034d01b1
atctttttcttcgccggccagggctccggcatggccttcagcaagctgaccggcggcggagcgacgacccccgccgggctgatcgcggcggcggtggcccacgccttcgccctgttcgtggcggtgtccgtcggcgccaacatctccggcggccacgtgaacccggccgtgaccttcggcgccttcgtcggcggcaacatcaccctgttccgcggcctcctctactggatcgcccagctcctgggctccaccgtggcgtgcttcctcctccgcttctccaccggcgggctcgccaccggcaccttcggcctgaccggcgtctccgtgtgggaggccctggtgctggagatcgtcatgaccttcggcctcgtctacaccgtgtacgccaccgccgttgaccccaagaagggcagccttggcaccatcgcccccatcgccatcggcttcatcgtcggcgcgaacatnctcgtcggcggcgcgttcgac

SEQ ID NO: 43265 - DNA, 483 bp, Oryza sativa
  Clone ID: uC-osroM202034d02b1
cttgttccaaccatggcgacgaggccggcgcggttgtctgctcccgcagtggcggctatacttgtcgccgccttagccttgtgcgcagccacggcgtcggcggcgaacgtcacgacgacgacggcgacggcgccgagcggcgggtgctacagccacctgttcaccttcggcaactcgctgatcgacaccggcaacttcatccactactccacctcgccgggccccgtcgcccgctccccctacggcgagaccttctttcgccgtcccaccggccgctggtccgacggccgcctcatcgtcgacttcatcgtggagaggctggggttcccgtactggacgccgtacttggccgggaagagcagggaggactttcggtacggcgccaacttcgcggtggcgagcgggacggcgctgaccagctgctgttcaagcgaagcaccttagcgtcgccggcattacgccctacttccttggcggtcaggt

SEQ ID NO: 43266 - DNA, 513 bp, Oryza sativa
  unsure (1)..(513): unsure at all n locations
  Clone ID: uC-osroM202034d03b1
cgtcttcgtactcgcctctctccgcgccctcctccgccgccgctcgccgccgttcgtctccgccgccaccgccgccgccatgagggagtgcatctcgatccacatcgggcaggccggtatccaggtcgggaacgcgtgctgggagctctattgcctcgagcatggcatccagcctgatggacagatgcccggtgacaagaccgttgggggaggtgatgatgcttttaacaccttcttcagtgagactggtgctgggaagcatgtcccccgtgctgtcttcgtcgatcttgagcctaccgtgattgatgaggtgaggactggtgactaccgccagctcttccaccctgagcagctcatcagtggcaaggaggatgcagccaacaactttgcccgtggtcactacaccattggcaaggagattgttgatctgtgccttgaccgcatcaggaagcttgccgacaactgcacttggtctcagggcttnctttgtgtcacgcttgtggaggaggaacg

SEQ ID NO: 43267 - DNA, 421 bp, Oryza sativa
  Clone ID: uC-osroM202034d04b1
tctatttcatccaggtcggttcacgaggtcatgcccaggctgtgatcctggcggctgggacatgcctgctttggcaggtgtatgagctggcataagatggcgtggacacgggctgtaatgtcgagcagcagcagaatacgtattacgtagtggcaattggacgaccaaccaatggaagctgattggttgctatgggcaaaggaactccatacacacatcattcatacaaagtacgtgaatcctttgcttacaagtggattaacaaaaagctgaaagaaggtttgcatgttacatgtatggctactgctggaaaccattggggagttctaatgtcaagaaatgcacgctattcccatcaagtagctgagatggactatctatatccacatgtagggatccatcgtcgatgagagacaggtta

SEQ ID NO: 43268 - DNA, 485 bp, Oryza sativa
  Clone ID: uC-osroM202034d05b1
catcatgcattctcttctagccttagcctagctagctagctttgttgtctagctctgatcgaggttggtggtgatcatggcgtcgtcgagggtgatcctagcgctgctgctcgcggcggcggcggtgatggcgtcgtcggcgcagctggacgagaagttctacagcaattcgtgccccagcgtggaggccgtcgtccggaaggagatggtgcgcgcgctcggcgccgcgcccagcctcgccggcccgctcctcaggatgcacttccacgactgcttcgtcaggggttgcgacggctcggtgctgctcgactcggccgggaacagcacggcggagaaggacgcgacgccgaaccagacgctgcgcgggttcggcttcgtcgagagggtgaaggccgccgtggagaaggcatgcccgggcaccgtcttctgcgccgacgtgctcgcgcttatggccagggacgccgtgtggctgagcaagggcccgt

SEQ ID NO: 43269 - DNA, 427 bp, Oryza sativa
  Clone ID: uC-osroM202034d07b1
cttttcctcccttccaccacgacgcgaccgacgcggcggagaaacccgcgaagccgcagtccagccagcgaggggccgccagccgaagctgaagcgagagctagggtttgctccaccccttgaacccgcccgcgcccccgccgccacgaggccgatcgagggttctgcttctgaggctgtcaagcctggcggctaattgggatggaccttgtgggatcgctgctggtgaacatgactcacttggttgacacctcggggctccagttcttcggctggctcatcaccgccggctccttcggcctcgccgcgctcatctacgccctcctcaggctgcagagggcggcgtcgctgtactggatcaaggcggctgccagggagaagaaggcggcgtggaagtcgttgcggtgccccagctccggccacacct

SEQ ID NO: 43270 - DNA, 431 bp, Oryza sativa
  Clone ID: uC-osroM202034d10b1
aatctcatccagctcggagcacgaggtcgcgcccaggctgggatccgatcgggcggtcgatgccggcttcggcggcggcggaggcaggctggggatggcggggcggcgagctatgaggccgagcggcagcagcatgcgtggggtggtggcgcggctggccgccgcgcggtcgccggccgtgtcgttcctggtggcggcggcggcgggcgcggcgctcgtcggaggggtgtacttctggctggtggtctcgtcgttccgcctccccgactcccgcgccgttgggtgcttgcctgatggcgaggggtcgtgggcgatcgggatgtactacgggaagagccccctcgagctccgccccatcgagctggaagggaggagcaatgggaacagctcggcgtggccggtggcgaaccccgtgctgacctgcgcgaccc

SEQ ID NO: 43271 - DNA, 351 bp, Oryza sativa
  Clone ID: uC-osroM202034d11b1
gagtaaaaacctgacaataatatgctactacagaagtatttggacaaggcagcttcagcagcagcaactcaagcacaagatcactgaactgattacaggcagcttaactgagcactcactcctaatcctcctcctcactcccccactccatatcctacacctgactactttaatcaccctcccaaacacaaacaacagctagtagaattatcacaagtcaacaccagcagttaacaatgagaagtaaacattactaaacacatagtaggccataccaacaacatggagtagatcaattctcatccatggcggctgttgctgcggcagcggcggcggagatcaccttggcct

SEQ ID NO: 43272 - DNA, 525 bp, Oryza sativa
  Clone ID: uC-osroM202034e01b1
cttctcttctcctccggctcttcttcagtatcgaatcctctcttctcctcgtgcccaccaccaccaccgtagcaatggcgggcaacgggccgatcaacaaggaggacccgctcaactggggcgcggcggcggccgagatggccggcagccacctcgacgaggtgaagcgcatggtggcgcagttccgcgagccgctggtcaagatccagggcgccaccctccgcgtcggccaggtggccgccgtcgcccaggccaaggacgccgccggcgtcgccgtcgagctcgacgaggaggcccgcccccgcgtcaaggccagcagcgagtggatcctcaactgcatcgcccacggcggcgacatctacggcgtcaccaccggcttcggcggcacctcccaccgccgcaccaaggacggccccgccctccaagtcgagctcctcaggcatctcaacgccggaatcttcggcactggctccgatggccacacgctgccgtcggagaccgtgcgggcgggcatgctcgtgcgca

SEQ ID NO: 43273 - DNA, 471 bp, Oryza sativa
  Clone ID: uC-osroM202034e02b1
ccttcctgtcgaaccctctccagtctccactccactgaatcctcccacctcggctcgaaggaatggcaagcggtagtgaagctgagaagtcacctgaggttgtgctggactggcctaagaaggacaagaagaggcttctacatgctgtttaccgtgttggagatttggatcgcaccattaaatgttacacagaatgctttggaatgaaattactgaggaaaagagatgtgcctgaagagaaatatacgaatgcatttcttgggtttggacctgaggacaccaactttgcacttgaattgacatacaattatggtgttgataagtgcgacattggagcaagatttgggcatttcgctattgcaactgaggacgtgtacaaattggctgagaaaattaaatccagttgttgctgcaagatcactcgtgaacctggtcctgtaagggaggatccactgtgattgcctttgcaca

SEQ ID NO: 43274 - DNA, 452 bp, Oryza sativa
  Clone ID: uC-osroM202034e05b1
ccttcttcttcctccattcctccgccgctagaaccttctagaagctctcctcctcctcccatggcggcgacgatcgtgtccgtcaaggcgcgccagatcttcgacagcaggggcaaccccaccgtcgaggtcgatgtgtgctgctcagatggaacctttgcaagggctgcagttcccagtggtgcatcaactggtgtctatgaagctctcgaattgagggacggtggatctgattacttgggaaagggtgtttccaaggctgtcgacaatgtgaactcggttattgccccagctctgattggcaaggaccctacgtcacaggctgagcttgataacttcatggttcagcagcttgatggaaccaaaaatgagtgggggtggtgcaagcagaagcttggtgctaatgcaatcctggctgtgtcactggccatttgcaaagctggagctatcat

SEQ ID NO: 43275 - DNA, 533 bp, Oryza sativa
  Clone ID: uC-osroM202034e11b1
accataccaaagatgagcaacaccaccatggctatttccaccatccttctcttcctcctcgccggcctcgtcgccgcccacggcgacggcgacaccatgatccgtctcccaagcgacggcgccgaagcaccaccacgcccgcccaaaccctgggactgctgcgacaacatcgagatgtccccgctcgagatcttcccgccgctgtaccgctgcaacgacgaggtgaagcagtgctccgccgcctgcaaggagtgcgtggaggcgcccggcgacttcccccgcggcgccttcgtgtgccgcgactggtactcgacggtggacccgggccacatgtgcacggcgccggatcagccgacgacgaagaggccgtggaagtgctgtgacagcatcgtgcagctgccgcagaggatcttcccgccgttctggcgctgcgacgacgagctggagccccgcaagtgcaccgccgcgtgcaagtcgtgcagggaggcgccggggccgttcccggggccgtcatctgcgaggacgctactggg

SEQ ID NO: 43276 - DNA, 450 bp, Oryza sativa
  Clone ID: uC-osroM202034f02b1
ccttcctgtcgaaccctctccagtctccactccactgaatcctcccacctcggctcgaaggaatggcaagcggtagtgaagctgagaagtcacctgaggttgtgctggagtggcctaagaaggacaagaagaggcttctacatgctgtttaccgtgttggagatttggatcgcaccattaaatgttacacagaatgctttggaatgaaattactgaggaaaagagatgtgcctgaagagaaatatacgaatgcatttcttgggtttggacctgaggacaccaactttgcacttgaattgacatacaattatggtgttgataagtacgacattggagcaggatttgggcatttcgctattgcaactgaagacgtgtacaaattggctgagaaaattaaatccagttgttgctgcaagatcactcgtgaacctggtcctgtaagggaggatc

SEQ ID NO: 43277 - DNA, 473 bp, Oryza sativa
  Clone ID: uC-osroM202034f04b1
gggcccggaacttactggctggaccgacgcatgcgttgacttggaggaagaggctgcaagaatgcacaaaaccggtatgcctgggcggaccgatacgggagtggctgcggtgacgctaatattggccgtgtgacctcatgccggggtgctgtctaagattggtgaagcaccagaatacaagaacagggaatgacaatcaccggtggatactgcggaaaagggaaagtgctacactcggctggcacacatatagatgacactgaacacacactacctgaacgagtacatgtgaggtggtgtacacattgctcaagaacgccttctgtccgtaatcagtactctttcactcataggatgatgatgacgatcgttgttttctaccctacttcagttctagaaactggacttgatattctcttctgttggtagcacggatggtgatgatgggaacacaacttggtggtgatgtgccg

SEQ ID NO: 43278 - DNA, 514 bp, Oryza sativa
  Clone ID: uC-osroM202034f05b1
gtttattgtctgatcgtctgcttgaagttctgaattgtactggttgtccaaatattaagaaagtcatcatcccttcaatgacaacctatctacgcctgtctaaaatcaatcttaatctgtccacaaatttaaaggaagtggatttgacatgctccaatctttatactttgaacctgagcaattgtagctccctggaggttctgaagcttgattgcccaagactgacaaatctccaacttctggcatgcaccatgttgcaagatgaggaactagaatctgcaatatcgcgctgcagtgcattggagattctcaatgtgcactcttgtccaaagataaatgtgctggactttagcagactgcgtgtggtttgtccaagcctcaagcgcatccaaagcagccttatcacataatttgaggctgcgattatttcgaggagagttattgaggcaatagttggcattcgtgcgggccctttcatggacgccggtgattctagcttagattcagaaacaac

SEQ ID NO: 43279 - DNA, 273 bp, Oryza sativa
  Clone ID: uC-osroM202034f06b1
tttttatgtctgatcgtcagctagaaggttaacatagggcttgttgtccaatcatgagggatgacatcatcccttgaatgacaacctatatacgctcgtctaaatagaatattactgagtccacatatttaaaggaagtggattccgacatgcaccaatcttcatactttaaaacctgtgcaattgtagcatcccgcaggatattaagctcggtggaccaggatcgactaatcaacaacctctggcatgcactatgtagcaagatgaggagac

SEQ ID NO: 43280 - DNA, 309 bp, Oryza sativa
  Clone ID: uC-osroM202034f07b1
gagtaaaaacctgacaataatatgctactacagaagtatttggacaaggcagcttcagcagcagcaactcaagcacaagatcactgaactgattacaggcagcttaactgagcactcactcctaatcctcctcctcactcccccactccatatcctacacctgactactttaatcaccctcccaaacacaaacaacagctagtagaattatcacaagtcaacaccagcagttaacaatgagaagtaaacattactaaacacatagtaggccataccaacaacatggagtagatcaatcctcatccatgg

SEQ ID NO: 43281 - DNA, 314 bp, Oryza sativa
  Clone ID: uC-osroM202034f08b1
tctatatcacatcacactaccactgatgatagtgtgctcttggtgaggcctccaagaagttgcctgaccacacaagcacaaagcaagcactatcaccaaaaggatcagagaagaaactgatatcactatctgatcagtgtagcattgcagcctctcttcttggtaggagtgagctagcacagtgaagagctaattaagccatttgtgtgagcttgcgttgagtgagctctgagctaatatggatgttgagtcaaggcaaggccccaagggtggtgacaccatggctgcctccgaggtctcccgggactggaggg

SEQ ID NO: 43282 - DNA, 385 bp, Oryza sativa
  Clone ID: uC-osroM202034f09b1
ctagtttgagtgagttagtagcagaagggagtagtgcaagatgccgatccgcaacatcgccgtggggagccaccaggaggtgtaccacccgggtgcactcaaggcggcgttggccgagttcatctccaccctcatcttcgtcttcgccggccagggctccggcatggccttcagcaagctgaccggcggcggagcgacgacccccgccgggctgatcgcggcggcggtggcccacgccttcgccctgttcgtggcggtgtccgtcggcgccaacatctccggcggccacgtgaacccggccgtgaccttcggcgccttcgtcggcggcaacatcaccctgttccgcggcctcctttactggatcgcccagcttctgggctccacc

SEQ ID NO: 43283 - DNA, 508 bp, Oryza sativa
  unsure (1)..(508): unsure at all n locations
  Clone ID: uC-osroM202034f10b1
attgagatcattcccccgcagtacgaacaagactggtatagatggcttgaaaatatacgtgattggtgtgtttcaaggcaacattggtggggacaccgtgtacctgcatggtatgtgacactagaagatgaccaggagaaaactctaggttctgacaatgaccgctggatagtcgccaaaagtgaaagtgctgcaagcgttgaggcacagaaaagttatccaggaaagaaattcatcctaaatcaggatcctgatgtgctagacacatggttttcatctgctctcttccccttagcagtacttggttggccagatgatactgctgacctccgttctttctaccctacttcagttctagaaactggacttgatattctcttctgttgggtagcacggatggtgatgatgggaacacaacttggtggtgatgtgccgtttcagaaggtttaattgcatnctattgtatgcgacacacatgtgncgaaaatgtgcaagtcacttggtaatg

SEQ ID NO: 43284 - DNA, 437 bp, Oryza sativa
  Clone ID: uC-osroM202034f11b1
cttactggctagccattgagggagtccagcctgcaattccagagaatcctcctgtagatgctatcgtagcaccaacagagaataaaaggacagagcatgggaaagatgatgggcttcctgttgacatcaagcttcctgttaagcatgtgttatctagagaactccagatgtattttgataaaatagcagagcttacaatgagtagatctgaaacctcagtttttagagaagcattagtgagcttatcaagagactcaggccttcatccgttggttccttacttttcctacttcatcgccgatgaggttacccggagtttaggtgatcttcctgttttatttgctctcatgcgtgtagtccaaagcctcctacacaatccccacattcatattgaaccatatttgcatcagttgatgccgtcaattatcacctgcatg

SEQ ID NO: 43285 - DNA, 388 bp, Oryza sativa
  Clone ID: uC-osroM202034g01b1
gtttgctctcctctcgatctccattcgtttttgagttcctcgtttgctccgtctctctttcactcatgggcaagattaagatcggaatcaatgggttcggccgcatcggcaggctggtggccagggtggcgctgcagagcgaggatgtcgagctcgttgccgtcaacgatcccttcatcaccaccgagtacatgacatacatgttcaagtatgacaccgtccacggccagtggaagcatcatgaggtcaaggtcaaggactccaagaccctcatctttggcacgaaagaggttgcggtgttcggctgcaggaaccctgaggagatcccatgggctgcggctggtgctgaatacgttgttgagtctactggtgttttcaccgacaagga

SEQ ID NO: 43286 - DNA, 464 bp, Oryza sativa
  Clone ID: uC-osroM202034g03b1
agttcctcgtttgctccgcctctctttcactcatgggcaagattaagatcggaatcaatgggttcggccgcatcggcaggctggtggccagggtggcgctgcagagcgaggatgtcgagctcgttgccgtcaacgatcccttcatcaccaccgagtacatgacatacatgttcaagtatgacaccgtccacggccagtggaagcatcatgaggtcaaggtcaaggactccaagaccctcatctttggcacgaaagaggttgcggtgttcggctgcaggaaccctgaggagatcccatgggctgcggctggtgctgaatacgttgttgagtctactggtgttttcaccgacaaggacaaggcagcagctcacttgaagggtggtgccaagaaggtcgtcatttctgctcccagcaaagacgcccccatgttccgtgtttgtgtcaacgagaaggagtacaagtct

SEQ ID NO: 43287 - DNA, 519 bp, Oryza sativa
  Clone ID: uC-osroM202034g06b1
gatagcttctgttgtctgggaccaggaggctggtcggtatgtttcagtgcctgcgcagacaagggcagttcctggtcttgatctgccagcaagaaccccgcgtttcttggcaaatccaactggtgagtcaagcaaccatgggaaaaatcttgcacctgcaaacgcttcttcctcggcaatatcatcagggcagccatctgagagattgacgtacactgggcagtcgatattctttggcgggccaattctgagcacctcaggtacgaacgctcagaggagcgaagcgggcacaagagcacgacctgatggaagtagtgatcctcctaatgccttccagcgtgatacccggggcgagagagcacgcacgggctccttcccggtgtttgctcctgggacttttcagaagaacccaccatttgacaagtgatttcctgttcttgatgtcatctctgctcaagagctttcatgacaatagaatgaatgatgcatctgcacttggatagttcagatcagttgaag

SEQ ID NO: 43288 - DNA, 505 bp, Oryza sativa
  Clone ID: uC-osroM202034g07b1
tggccgcccgcccggccgcgtacccggaccggactgggccgggccgacccacgcggtctgtcttccctaccaagcgagaccactcgggccccacaaaatctccgcttcttctccgagaccgagatggcactcgactctgttccatcctaccccagcgatcttggatccagcagggccaggacgccgcagcagcaaagggtcagccccaggaaggaggagcggacatggacgaccgacacctacgcgccgtacgacgacggccaccagtggaggaagtacgacgagaagaaactctccaattccaacttcccaaggttctattacagatgcacctacaagaatgacatgaagtgccctgctacgaagcaagtccagcagaaggacactaatgatccaccatttgtctcagtcacttaccttaaccaccacacctgcaacagcagctcaaagatcgtaggcagcacttctgaatctactgtgcagtcgaggaaagccatttcgatct

SEQ ID NO: 43289 - DNA, 395 bp, Oryza sativa
  Clone ID: uC-osroM202034g12b1
tttgttcgatcgattgcttctccctcctctcgctactagactagagagtaggtagagctagctttctagctcgtggatcgttaagtttgtagtcctgcccgggcgccggcggtgaggtcgcgatggccggcggcgcggtggtgagcacgggggcaggcaaggactaccctggcaagctcaccctcttcgtcttcttcacatgcgtcgtcgccgccaccggtggtctcatcttcggatatgacatcggtatatcaggtggtgtgacgtccatggacccgttcctgaggaagttcttcccggaggtgtatcggaagaagcagatggcggacaagaacaaccagtactgcaagtacgacaaccagctgctgcagaccttcacctcgtcgctctacctc

SEQ ID NO: 43290 - DNA, 367 bp, Oryza sativa
  Clone ID: uC-osroM202034h03b1
ccgcctccgtggtggcatgcagatctttgtcaagacactgaccggcaagaccatcaccctcgaggtggaatcttctgacaccatcgacaacgtcaaggccaagatccaggacaaggagggcattcccccggaccagcagcgtctcatctttgccggcaagcagcttgaggacggcaggacccttgctgactacaacatccagaaggagtcaacgcttcaccttgtcctacgtctcaggggaggcatgcaaatcttcgtgaagactctgaccggcaagaccatcaccctcgaggtggagtcttgtgataccatcgacaatgttcaaggccaagatccacgacaaggagggcattcccccggaccagca

SEQ ID NO: 43291 - DNA, 397 bp, Oryza sativa
  Clone ID: uC-osroM202034h04b1
gaggaaaggggcaattaatgctattcaagatctatatgaagttgttcatcatgaagtgctgtctggtgatatgagtggcaatattgatgaatgggaacagattaagcaagcaagagctgaaggccgtctcttcaataatctcaagtggccaactgactctggattgaaggacttgatcaaacgattgtactctcttctgaccatcaaggagtcagctgcaaatgttcctaaaaacctggaagctagacggagattggagttctttacaaactctctggtcatgcacatgcctgttgcaagacctgtttcagaaatgctttctttcagcgtatttactccatactactgcgagactgttctttatagtaaggatgatctccagtagagaaatgaagat

SEQ ID NO: 43292 - DNA, 298 bp, Oryza sativa
  Clone ID: uC-osroM202034h07b1
ttgtttcgttgagaggaagccatccagccagctagctataagatagatagaagaagatcaagacgaccaccaagttgaggattggcatttcttgtagcttagagacaaattatttactagagatcaagaagcctattcggcgtccatggggagcaccggcgactgcggcaatggaaaggcggccgtccgcggcggcgggttggtggtgccggagatcaaggttaccaagctttttattaacggcgagttcgtcgacgccgcctcgggcaagacatttaagacaagggacccacgaaca

SEQ ID NO: 43293 - DNA, 448 bp, Oryza sativa
  Clone ID: uC-osroM202034h10b1
tatttgaggaaaggggcaattaatgctattcaagatctatatgaagttgttcatcatgaagtgctgtctgttgatatgagtggcaatattgatgaatgggaacagattaagcaagcaagagctgaaggccgtctcttcaataatctcaagtggccaactgactctggattgaaggacttgatcaaacgattgtactctcttctgaccatcaaggagtcagctgcaaatgttcctaaaaacctggaagctagacggagattggagttctttacaaactctctgttcatgcaaatgcctgttgcaagacctgtttcagaaatgctttctttcagcgtatttactccatactactccgagactgttctttatagtaaagatgaactccagaagagaaatgaagatggtataagtacactattttatctacagaagatttatccagatgaat

SEQ ID NO: 43294 - DNA, 422 bp, Oryza sativa
  Clone ID: uC-osroM202034h11b1
tttctttcacatggcgaagtcggcgatgccggcggagtacggggacgaccacggcgagtggtacggcgcgtcgctgcgctccgtgtccggcgccgggaagatgctgtacgcgtacgacaccgtgctccacggcttctccgcgcggctcaccgcgcgggaggcgcgcgacatggcggccatggacggggtgctcgccgtcaacccggaggcgaggtacgagctgcacaccacgcggacgccggagttcctggggatcgccgggaacgacgggctgttcccgcagtccggcacggcgggggacgtcgtcgtcggggtgctcgacaccggggtgtggccggagagcaggagctacgacgacgcgggcctcggcgaggtgccgtcgtggtggaagggggagtgcatggccgggacggtgttcaact

SEQ ID NO: 43295 - DNA, 457 bp, Oryza sativa
  Clone ID: uC-osroM202035a04b1
atatatggcaaattacttccttttcaaaatctaggataccgttgacttttcgtactaacatttgacgttcgtcttattcaaaaatttaatataaatatgtaattgtataagctaagattatattgtagaaatttaatataattaaatgatataaggcaaatggtcaaacattatgctaaaaatcaatgacgtcatacattttgaaatggagggagtacttgatttttgttcttgtgagatgaggttgcaagtctcctctgtaatgatgtataaacttgcctggccaaaaataataataataataataatctggcccaactgttgttaggtttattttgtgacagaaaatttcgtggtagtaaaaatttcagaaagtaatagtagtatatatagtagtaaataataacaaagaaggattttttttgtccatgtggagcatactgggcccatggatcta

SEQ ID NO: 43296 - DNA, 479 bp, Oryza sativa
  Clone ID: uC-osroM202035a05b1
gtcttttgcgcctccgccgccgccgccttcttcgtgtgctgagttcgtagattagctcgagctcgccgccatgtcgtccagcgaggtcgcctgcacgctcgccgccctcatcctccacgacgatggcatccccatcacctctgagaagatcgccaccctggtgaaggcggccaacatcaaggtcgaggcctactggcccggtctcttcgccaagctcctcgagcaccgcagcgtcgatgacctcatcctctccgtcggatctggtggtggtgctgctccagttgctgctgctgctgcccctgctgctggcggtggtgctgctgctgccccagctgccgaggagaagaaggaggaggcgaaggaggagagcgacgatgacatgggtttcagcttggtcgactaagcagtccacagatgttagccagtccccctatgctttgcaagactatcttatgttgtgtcttttaggttcacttaaa

SEQ ID NO: 43297 - DNA, 218 bp, Oryza sativa
  Clone ID: uC-osroM202035a07b1
tcgctcgcctctccttcctcctctgctcccactccgcctcgccgccgcctccaccatgtacggcgtcggcggcggaggaagaagttttaacgcgccctacacggcattggccctttggtttatccacttggactattactactaggaggaggaggagttattgtaggtgctttttcattatggacttttagttcaattaatcattcaatttatcattt

SEQ ID NO: 43298 - DNA, 504 bp, Oryza sativa
  Clone ID: uC-osroM202035a09b1
cactcttctctaggtatgttaaccagggaaagggaatgctccagcgtcaccagctgcttgcggagttcgatgccttgatcgaagctgacaaagagaaatatgctccctttgaagacattctccgggctgctcaggaagccattgtgctgccgccctgggttgcactggccatcaggccaaggcctggtgtctgggactacattcgggtgaatgtaagtgagttggcagtggaagagctgagtgtttctgagtacttggcattcaaggaacagcttgttgatggacacaccaacagcaactttgttcttgagcttgattttgagcccttcaatgcctccttcccgcgcccgtccatgtccaagtccatcggaaatggggtgcagttccttaaccgtcacctgtcgtccaagttgttccaagacaaggagagcctctaccccttgctgaacttcctgaaagcccataaccacaagggcacgacaatgatgctgaatgacagaattc

SEQ ID NO: 43299 - DNA, 366 bp, Oryza sativa
  Clone ID: uC-osroM202035a12b1
cgtttgttctacggctcttcttcagtatcgaatcctctcttctcctcgtgcccaccaccaccaccgtagcaatggcgggcaacgggccgatcaacaaggaggacccgctcaactggggcgcggcggcggccgagatggccggcagccacctcgacgaggtgaagcgcatggtggcgcagttccgcgagccgctggtcaagatccagggcgccaccctccgcgtcggccaggtggccgccgtcgcccaggccaaggacgccgccggcgtcgccgtcgagctcgacgaggaggcccgcccccgcgtcaaggccagcagcgagtggatcctcaactgcatcgcccacggcggcgacatctacggcgtta

SEQ ID NO: 43300 - DNA, 219 bp, Oryza sativa
  Clone ID: uC-osroM202035b02b1
gttcttgctcgtgagcgggcgcactacttggttgatgcttgacaacacagactcagcggttatgaagcatgtgtccatgactgacgttacatttgctagaaacaacgcgcggaacagaaccagctgtaggaaaacagattgtggtgcaagtccgatgatctaattatgactgcaatatcttgaatctagcaaaacggcgctgaaacaaatggagtcagg

SEQ ID NO: 43301 - DNA, 472 bp, Oryza sativa
  Clone ID: uC-osroM202035b04b1
gttgtttgtggcggcggcgcaggcgccgggtcccgctgcgacgccggcggcgggcgccacggggccgccgaacgtgacggcggtcctggagaagggagggcagtacacgacgttcatccggctgatgaaggagacgcagcaggacacgcagctgaacagccagctgaacaactccttcaacggcaacggctacaccgtgttcgcgcctaccgacaacgccttcaacaacctcaagccgggcaccctcaacagcctgacgcagcagcagcaggtggcgctcgtccagggccacgtcctcccgcagttctactccatggactcctttcagacggccagcaaccccgtccgcacccaggcgttcggcaccgacggcccctacacccttaacatcaccttcaccaccaacaacaacgtcaacgtctccaccggcgtcgtctaggtcaccgtcaccaacgcgcttagcgcggtcaag

SEQ ID NO: 43302 - DNA, 509 bp, Oryza sativa
  unsure (1)..(509): unsure at all n locations
  Clone ID: uC-osroM202035b05b1
gagaccccacatattcatatctgcaagcttcctcctcctccttcctcctgatcctttagcttcctatatacgattccaccatcgaaggccagggcccagacttgcttgccgcaggttactgatccaccgaaggagggaggcgcccgcccgccgccatggccgaggtgacggtggtccgtgcggagcgcgaggaggagtccaccctggagcagggtctcctcgccatcccggaggaatccaaccaacttacatacactggagatggatctgtcgacttttctgggaatcctgttgtgaaggagagaactggtagatggagggcatgcccatttatcttaggtaatgagtgctgtgagcggntggcctattatggaatctccacaaaccttgttacatacttgacaaagaaactgcatgatggtaatgcttctgctgctagcaatgtgactgcatggcagggaacttgctacttaactccccttattggagctatactggctgatgcatac

SEQ ID NO: 43303 - DNA, 463 bp, Oryza sativa
  Clone ID: uC-osroM202035b06b1
attaagcttccagaggcagtgaggcaccacaaattttcagacacatgctggctggagtagtgtaaatatacacacacacacactctctctctcatagtaacagggctcaagggccaacaagattagcactcactggttcttcttccttgtttatttggtaattactctgtccctgattcttctccggctccggcgagatcatgtatcttgtgaaggatatcggcggcgccattgcgctgatgggcgtgtcactggtgctcctgggcacatggccggtggtcctcgccgtgctggagcgccgcggccgcctcccgcagcacacctacctggactacttcatcaccaacttcctcgccgccctcctcgtcggctttaccttcggccagatcggcgccgacacgccggagacgcctaattttctcacacagctcacccagatgcaggacaactggccttcaatctt

SEQ ID NO: 43304 - DNA, 540 bp, Oryza sativa
  Clone ID: uC-osroM202035b07b1
cttggattggatccaattgcgggtggtggtggtggtgccgccgcgtgctgctagatctcgggctgtggaggcaatggcgacgcggccggcttcgcggcagcggagggcgtcttcggcggcggcggcggtggcggtggtgaggagttcgccgcagccgcagcagcagcagcagcagcaactgccgataccgcagtcggggtcgccgacgtcgacgacgaccaccaccacgtcctcgtcgcggctcacgccggagctctcgctcgacgggcccgcgtcgccgctgttcgccgggcttgacgaggacccggcgcccaaggagaatgtcaccgtcaccgtccgtttccggccgctgagcccccgcgagattcggcaaggggaggaggtggcatggtatgcggacggcgacacggtcgtgaggagcgagcagaatcccaacgttgcttatgcttaccatcgggtttttgcaccaactactacaacccgtcaggtatatgatggtgctgctcaacatgttgtcagcggtgccatggagggaggaaa

SEQ ID NO: 43305 - DNA, 490 bp, Oryza sativa
  Clone ID: uC-osroM202035b08b1
tcgtttcgatctccctcctctcctcctccgtcgcgccgcagacgccaaccccgatcccgatggccgcctccgcctccgccgccggcgccggcgccggcaagtcgctgttccagaccttccgcaagttcttcaagaagccgtgggagatcaccggcccgtgcgcctcccccgagtaccgcagcgcgctcccgggcgccctggagtaccgccaccgctgcccggccaccctgacgaaggacacgatggccgtcgtgcccacctccgagcccgagaccgtctacgacatcaagtactacacgcgcgaccgccgccgtgaccgcccgcccgtccgccgcaccctcctccgcaagcccgacctcgagcgctacatggccgccaagcagttcgaccccgccaaggacttccccgtgccttacgtgaacaccgccgtggaggaggactacgacgccgtcggcggcggctaccaaaagtgatggtcgaggtatctacc

SEQ ID NO: 43306 - DNA, 521 bp, Oryza sativa
  Clone ID: uC-osroM202035b09b1
tcgcttctcctccggctcttcttcagtatcgaatcctctcttctcctcgtgcccaccaccaccaccgtagcaatggcgggcaacgggccgatcaacaaggaggacccgctcaactggggcgcggcggcggccgagatggccggcagccacctcgacgaggtgaagcgcatggtggcgcagttccgcgagccgctggtcaagatccagggcgccaccctccgcgtcggccaggtggccgccgtcgcccaggccaaggacgccgccggcgtcgccgtcgagctcgacgaggaggcccgcccccgcgtcaaggccagcagcgagtggatcctcaactgcatcgcccacggcggcgacatctacggcgtcaccaccggcttcggcggcacctcccaccgccgcaccaaggacggccccgccctccaagtcgagctcctcaggcatctcaacgccggaatcttcggcactggctccgatggccacacgctgccgtcggagacggtgcgggcggccatgctcgtgcg

SEQ ID NO: 43307 - DNA, 538 bp, Oryza sativa
  unsure (1)..(538): unsure at all n locations
  Clone ID: uC-osroM202035b11b1
cgcccgtgccctaaaccgctcgccgccggcgacgttgcgcccccgaccgcgagtgggccggcggcgatgtccggccccgtcgttcccctcgcctcgacggctcaagggccctgcgagccctcccctggctctggcccgctccccgtttccgccgccgctagcgatccgccggcgccctcctcgtcggtgcccgccggcggtcgtgagccctccgctagcgggctgccccccgcggtgactcctcagcttggggatcatgatcaaggtggtttacctaactgtgtgccaaaagtggggatgacctttaattcagagaacgaagcttatgatttctacaactcctatgctagaaatgttgggtttagtatccggaagaaccacgcanatactagggcggatgggagtctttgctccaaatatttcctgtgcagcaatgaagggcagccggtggcaagcactacccagccggggcggaagaaacgttcttcaacaagatctgattgcaagcttcgtcttcagttctatattttccgagaag

SEQ ID NO: 43308 - DNA, 522 bp, Oryza sativa
  Clone ID: uC-osroM202035c02b1
ttgttgtttatccattcgctacaatttgcatctgcaaattaaagttgataactaatcatacaagctagtagcttcagcttgatttcatcttcagttctttctggataacaaatcagaccaactttgtcgatcgatccaaattcagagaaattatctctgagtggtgaattaaaagatggggtctctgatggctggatgggattcacccgttcttggcgatgagaacagagttcttgcgaggaggaacaagtcgctgacgagggaggaggtggaggcgttctggaagcagcacggcggcgagatgatgtcgggctcgccgctcggctcccccgccgccggcggcatggcgcggtcggccccggtgagccgctcgaaggcgcacgcctcgtcgcctcgcggcggccgtatcgacccggcgactcgcgtggagggcttctttcccacgacgacgccgtcgccgtcgagagccccagcaagagccacgactggtggacgaggagcaactgggcgtttctgaacgag

SEQ ID NO: 43309 - DNA, 523 bp, Oryza sativa
  Clone ID: uC-osroM202035c03b1
ctcaaggctgctcccatcctctccttcgagttagcttcctccttattcaaccatgggtaaggagaagacgcacatcaacattgtggtcattggccacgtcgactccggcaagtcgaccaccacgggccatctgatctacaagcttggaggtatcgacaagcgtgtgattgagaggttcgagaaggaagccgctgagatgaacaagaggtccttcaagtacgcgtgggtgcttgacaagctcaaggccgagcgtgagagaggtatcaccatcgatatcgccctgtggaagttcgagaccaccaagtactactgcacggtcatcgatgcccctggtcaccgtgacttcatcaagaacatgatcacgggtaccttccaggctgactgtgccgtgctcatcattgactccaccactggtggttttgaggctggtatctccaaggatggccagacccgtgagcacgctcttcttgctttactcttggagtgaaacagatgatctgctgctgcaacaagatggatgcca

SEQ ID NO: 43310 - DNA, 498 bp, Oryza sativa
  Clone ID: uC-osroM202035c04b1
atcctttgcaactgcactacactgcagcacacacaccccgcacccaccaagctaagtaattaatcatcaatggcttccgccgtggtgaagatggccgtcgtctgcctgctcctcctgtccgccggtcatctgatggcctccgccgccgccgcgcgcccggacaccgtcgacgacgcggcggcgctgctgcgcctcaaggaccgcatcgagctgcaggaggaggaggccctggccctcgccgaggagctcgccctccttgacgacggcgccggcgacgccgtcggagccggctgctcctgcagcaccaccaagtgcaagacgtgcatcgccacctgcgggatcaagtgcttccccaagggaatcaaaggctttcccacctgcttcttcgcctgcgttttcacccaccagcaagtgcttcgccttcggcgcctaatcgatcaaatcgatcacgtcggcgtctcggctcgtcatcaaacgcgatcgatcgggcgtttcacc

SEQ ID NO: 43311 - DNA, 319 bp, Oryza sativa
  Clone ID: uC-osroM202035c05b1
ctctttcttccagaccgtggcatgcacggcttgacacagacgctctcgtacgtcgtcgtcgtcgccgtcgtcctcctcgtcggcataaagcagtctccactgcaaaccagctagctgtagctctcaattcgtaggtgagatcgacgcgcatcgcgccgcgtctacgtttgtatatagagggggagagaggatcggaggagccgatcgagctgaagtagggatggtgctgagggcgtgcacaatggtggaggggtcatctttcgtcgtcggcggcggcggcggtgtgccgcttttcgagtggcttaagccgaggacctcg

SEQ ID NO: 43312 - DNA, 452 bp, Oryza sativa
  Clone ID: uC-osroM202035c07b1
ctcttcccccgctccgttctcgtctccgctctgctctggtctgctctgctgcgagggtgggtgttgcttgtaccgggcggggatggaggcggcgacgatggcgtggacggcggcgggggtggggatggcgctggtgtactggttcgtgtgggtgatgggagcggcggaggtgaaggggaagcgggcggtggatctcaagatgggatccatcacgaacgacaaggtgaaggacaagtacacgcagtactggtcgttcttccgccgccccaaggagacggcgaccaccgaggcctccgccgagaaggtgccggccttcgtcgacaccttctacaacctcgtcaccgacatctacgagtggggttggggtcagtcgtatcacttctccccttccctccccggccgctcccaccgagaggtcacgcgcgtacacgaggagcgcgttgccgaccttc

SEQ ID NO: 43313 - DNA, 510 bp, Oryza sativa
  Clone ID: uC-osroM202035c08b1
cctcattcttatttttctcattatctagtggtctagttagtaatgaagcttctatgtcctttctaggtgatcattctttttgtagtattttttatactctctagatgatgcttgttctcttcatttattttttctgcagacacttatcatgggtaaccgtgatgttattgatgaaatgtcaagcacaaattcagctgttttgacatcaatactcaagttaattgacaagtatgatctatatggccaagtggcataccccaagcaccataagcaatctgaagttccagatatttatcgtttagcggcaagaacaaagggggtgtttatcaattgtgcttttatcgagccatttggactaaccttgattgaggctgctgcttatggtctaccaatggttgctactcgaaatggtgggcccgttgatatacatcgggttcttgacaatggtattctcgttgatccccacaatcaaaatgaaatagctgaggcactttatagcttgtttctgat

SEQ ID NO: 43314 - DNA, 431 bp, Oryza sativa
  unsure (1)..(431): unsure at all n locations
  Clone ID: uC-osroM202035c12b1
gtctcgcgtctcgtgtctccgtctcccgccgaggcaggcagcaaccatgatatccccgcgccccgcgctgtcctcctccagcttcctcgcgttccgtcccgcggcggcgtcgcccacgacgaacccctcgccgccgccctccccgcgcctccacgccgcgccgccgccgctctcggcctccttctccccgtcgacctccgtcgtcgcgccggaccacgtggccgccgccgccgccgccttgttctacgacgtcctcggcctccacgcgggggccagcgcgcgggagatcaaggacgcgtaccgtcgcctcgcacgcgccgttcacccggacgcctgcccgcaccccgccgtcgngtactccgacgacttcatccgcgttcacgccgtctactccacccttttcgaccccgaccagcgcgccgactacgacc

SEQ ID NO: 43315 - DNA, 506 bp, Oryza sativa
  Clone ID: uC-osroM202035d02b1
tgttctagcgagctgtacgaatccatatgcatcccttcaactccctcccctctcttccctttctcgattagtgttagatctgagcttacagagctatagctcaaatctgcggcatttgggttttagatgcgatcctggctttcgtgtctcttcttcccagttcgttgtattcctgcttcttttagtcgatttcggaccaatttaggtgcgtgcaagaagcagaagttttacctgttggcgtgtgattgggcgaagttcttggaatagatttgggcgcagaggcatcgcgcagctattccctgccaaatctttacccgtttcgttttttttttactgtgatttggatttataaatgaggtaaatataccaaacagtaggattttttttttcaggaagtcaggatgagatcatgggagaggcgaaaataatcaataatgtgccaaagtgggtatgaaacccgactactagtagttgacaatcgtgattagtgattactatgaaacagc

SEQ ID NO: 43316 - DNA, 429 bp, Oryza sativa
  Clone ID: uC-osroM202035d03b1
tcgttgttttactaacccacctgagcctgaattgattgatggaggcagggatatgggaaatggacagacttcacatcaactacatttaccacgcactatggatgatatggttaatggatgaattgtgaaggtcaaatactgagatacctgcatgctgtaccggtcacctctatgctctaactggtctatatgtaataactgtgtggagcgggttgatcatcactgcacttgggttggcaaatgcattgcaatgcaaaataaccgatttttttacatgcctgtattctcaaccacattgctgggcctctatgtgtatgactcgtgctgggagctcattgttaaaatcagagatgctgccaatacaacgatatgtaaagcaatgttaaagacacgcgctttaaatggactgagcatatagtgctttatttg

SEQ ID NO: 43317 - DNA, 528 bp, Oryza sativa
  Clone ID: uC-osroM202035d04b1
gtcgtcttcgacttcactccaactccacctccacctccaccacccctctctcgaagccatcgccgcctgtctctcctctccagctcgcccggtcagagtccgcgggggattcgattgattggtagctagctaggcttccgcgcgcggcgacccaacgtcggtggaggcggtgctgaaggccgggcggcgtctcgttcgtggtgcggtggagatgggccaggacctcgccgagatccaccctcgcgagctccagttcacctttgaggtgaagaagcaaagttcatgtactgtccatcttgtcaacaaatccaatgaatatgtcgcattcaaggttaaaacaacatcacctaaaaggtattgtgttcgaccaaacactggagtcatccttccaaggtcaacatgtgatttcacagttaccatgcaagcacaacgtactgctccaccagacatgcaattaaaagacaagtttttggttcagacaacagttgtcccttaggaacatcaaatgaggaccttgtcctttttatt

SEQ ID NO: 43318 - DNA, 526 bp, Oryza sativa
  Clone ID: uC-osroM202035d06b1
atcaacgactagtcgcggcgaccaagagccaaaccctacgcctcctcccctccccctccacctcgtcctccccgcgagcggcggcggccatggattcctcctccggcggcgcgggcggcggcggcggcgcgcagatcaaggggatggggacgcacgggggccgctacgtgctgtacaacgtgtacgggaacttcttcgaggtctcctccaagtacgcccctcccatccgccccatcggccggggcgcctacggcattgtctgcgcggctgttaactcggagaacggcgaggaagttgccatcaagaagattggcaatgcattcgacaaccatatcgatgccaagcggacactgagagaaatcaagctgcttcgccacatggaccacgagaatattattgccataaaggacataatttcgccccccaagaagagacaactttaatgatgtttacattgtttctgagttgatggatactgatctccatcagatcatacgctcaaatcaaccattgactgatgaccact

SEQ ID NO: 43319 - DNA, 522 bp, Oryza sativa
  Clone ID: uC-osroM202035d07b1
tcgttctcctctctcctctctctcgccctctccacactggcacactctctgtgaatctctccttctgttcctggttaattcgctcttcttcctctcgtatctccgccgcgatcgatggccatggagaaggtggacgccaaggagagggagaagatcgaggccgtccgcaagaccctccgcaagcaggctccgctcaccgccaagcaggcgatgtactgcaacgacgcgtgcgtggagcggttcctccgggcgagaggggagagcgtgaagaaggcggcgaaacacctgagaaccgtcctgtcctggagggacaccatcggagccgatcacatcatcgccgacgagttctccgccgagctggctgacggcgtcgcctacgtcgccggccacgacgacgaggcccgacctgtcgtggtctttcgaatcaagcaggactacccaaagttccactcccagaaatcgttcgtgcggttactggtgttcacgctggaggtggccgtgtcatgcatgttccgcttcgtc

SEQ ID NO: 43320 - DNA, 264 bp, Oryza sativa
  Clone ID: uC-osroM202035d08b1
tcggcgtctcctcctcctccgccgccgccgccgccgcctccttctccgacgatgccttccctccccgtcgccgccgccgagccgatggccgtcgacgagtcggcctccaagaagtcgaagcgcaagctgaaggcggcggaggtggaggtggaggcctcgtcgaggaagaaggagaagaaggcgaagaaggcgaagaaggagaagacgaaggagaaggtggtggtggagggaggaggaggtggtcctcctctctagagagcttac

SEQ ID NO: 43321 - DNA, 476 bp, Oryza sativa
  Clone ID: uC-osroM202035d10b1
tcgctcacatgatagaaattcatatgtttggacacaagagggccatgattgggttcctacccttgttattctcaagctaaatcgtgcagctttatgtgtccagtggagcccaaaagaaaacaagtttgccgtaggaagtggtgctaagtctgtgtgcatttgctactatgaacaagacaacaactggtggattagcaaggttgttaggaagaagcatgaatcttctgtcactagtgttgcatggcatccaaacaatatacttcttgcaacaacatcaactgatggtaaatgcagagtgttatccactttcatcaagggtgtcgatacaaggggatcacatgcgagcacttctactgattggaaatttggagagcaaattgctcagcttgacctatcatctatgtgggcatttggtgtaaggtggtcgccaagtggaaagacactagcctatgcagggcacaattccatgatttatt

SEQ ID NO: 43322 - DNA, 522 bp, Oryza sativa
  Clone ID: uC-osroM202035d11b1
tcggtctggaatgcagccaatttttaagtccagttcccattccagctccgtctttctttcttctcctcctggatttctgccggctcgagatcttttcaacgctcttgagctagcggcggctttgtttaattcgtggtgagcaacgtcgtcgtcgacgacgaattcgatccggaggaagggttcgttgtccggcccagttcggccggccggatggcattgttgggcgtcctcgtcggggcggtgatcatcgtcgtcgccaccgcggccgccgtttcgggcagcgggctgccggtgcctggatacgacgggctcgccatcgggttctaccacgagacgtgcccacaggcggaggacctggtgctcgccgagatgagggagatcgtccaggaggacaggaccctcgcgccggcgctcctgcggttcatgctccaagactgcttcgtcagggggtgtgacgcgtccatcatgctgaaatcgcggaaaaaaatcgggagagggccgccactcgagcttcagccttcg

SEQ ID NO: 43323 - DNA, 446 bp, Oryza sativa
  Clone ID: uC-osroM202035d12b1
ttattgggcagtttggtgtcgggttctactccgcctaccttgttgctgagagggttgttgtgaccaccaagcacaacgacgacgagcagtatgtgtgggagtcacaggccggtgggtccttcactgttacacgtgatacctctggtgagcagcttggacggggtactaagatcaccctctacctcaaggatgatcagctggaataccttgaggagcgtcgcctcaaggatctggtgaagaagcattctgagttcatcagctaccctatctccctatggactgagaagacaactgagaaggagatttctgatgatgaagacgaggaagagaagaaggatgctgaggagggaaaggttgaggatgttgatgaggagaaggaagagaaagagaagaaaaagaagaagatcaaggaagtctctcacgagtggaacgtgatgaacaagcag

SEQ ID NO: 43324 - DNA, 468 bp, Oryza sativa
  Clone ID: uC-osroM202035e01b1
acagagcaacattgatttcatattcccattaagtgcagcagaatgttgtcaggcatttttcagcaaagtagttctactaacttaattatcaacagatgaacagcaaggtaccacttactactccttaatacataacaagcattccggcagctaagatcttacagtagactatatagagtcatccactaataacttacacaacagaatggatagcaaactggcgattctttgcctactatcttgctcactcctagcagttgataccacatttttgggtatcagggcctgtgacacgggtggtgaatggatcgatacgaacccacagcaaggagaagatcgatgcaaggaggatggcccaaacaacaacaatggtcggtgtaccggtttgccgacccatgagacccttaaggaaggggtacaggtggacaatcacccagaatgcaaagaagagcttcccaagagcggacc

SEQ ID NO: 43325 - DNA, 459 bp, Oryza sativa
  Clone ID: uC-osroM202035e07b1
tcgttcagctgatgcacgaatcggagacagcatcagcagatacgaccacgacgactgaagaacaagtgatgcagcagcagctgtcttggttgagaagcatgaagcccagagggaggccacagccattcatccccagcaagcgcacaaactagcttagctagctactcgtatttgccctcttcctctccctcctctgtaggctttgtatcttagttgtgtatgtatgagtgtatgacacacgctacttggttttcttgtttcattctttttggtgattcgttcgatatacagaaactatgtacatatatacacatgagatcgatttgctagttagatcgcaacaattaatggaacgttattatttggttgccaaagcaaacccttgataatttggggagagcaagatccgggtttttccattggaacttggcctactggttaagagaaattttggggata

SEQ ID NO: 43326 - DNA, 53 bp, Oryza sativa
  Clone ID: uC-osroM202035e11b1
tcggtcctagatcgcgagcggccgtcctttgtttaggttttttaattacctct

SEQ ID NO: 43327 - DNA, 530 bp, Oryza sativa
  Clone ID: uC-osroM202035e12b1
tcgctcctcttctcgcggccaacgagagagggagagggagagctaggaccaccgccactgcctcgggaagtaggtggctcccctgctttccctcctctcctccgccgtcgccgaggcagccagccaagtcgtcccagcaggtggtaggctactagtccgggtggccggcagtgagcaggaggaatcatctctggcgttcttgtctccgaggaactttgattctttctgggaggggatttggtgtgctgctgctgctccagatgcttcccaccaacaggaacaggccccagcagaggcctgccagatcttggtatttcatctcagacatggacttctccgatccgaagcgcaagccgcggtacctcagtaagatcctcatggtggcgctcctcaccgccatgtgcgtcgtcatgctcacacagccgccctgccataggaggactcccagtgtgttctccatccatgaaccccgcgtcacgcatgttctagtgacgggcggcgctggatatatcagttcgcacgctgcgctt

SEQ ID NO: 43328 - DNA, 527 bp, Oryza sativa
  Clone ID: uC-osroM202035f01b1
gtcctctagccaagcagcacgagcacacgagaaaacaagagaaaaaaagcagcagcggccatggagggatacgaccgcgagttctaccagttcagcgaccagctgcggctgcagacggcgagcttctccggcctctccctcggcgactccatctggtcctccccctccgaccgccgcaacgagccggccttcgacggcgagtaccaccacttctcctccccctcccccgccaagaacgccatcgccaacatcaacggcgtcgccggaaacctggatggcccgggcctcatcggctccggcaagctcgccttcggcgccaccaaggccgaccgctacaacagcgtcaacctccccgtcgacaacaacaacaacaacaagtcctacggcggcgccgccaagatcaacaacaacaacgtcaacgccttcgggttcaacaagatggggggttacaacaacagcagcaacggcggcggcaactacggcggcaacggcggcgacgtgaagagctacttcaacagtcggtcggg

SEQ ID NO: 43329 - DNA, 531 bp, Oryza sativa
  Clone ID: uC-osroM202035f07b1
tcgattctttgattcttccttcaatttccccttttcaactctgtcatcaacttaattgttagaagcgacctaaagattttgcggccgatcgagcatggcgtccccttcggctctgatcgcaatgctcctcgtcatggtcgtcggctgcgccgccgtggcctcggcgatggagctgagtttcattgtcggagatgcgcagggttggaacaccggcgtcgactacaccgcttgggcgaagggcaaaaccttcgaggctaacgacacgcttggtgagtctttctcgataatcaatcacttcattcgcacaatgctgctaaatgctaatgctatccagtttgccaattggcatttgaaatcgaacgctgattttatttggtgtaattaactgttttttgccttttttgtttcttcagtattcagatacgccaggatgcagcacacggtgacagaggtgaccaagagcgactacgacgcctgcaccgtcagcggcaaaccgatcagtgatttcgaaggagcgcgcttgtgacattc

SEQ ID NO: 43330 - DNA, 391 bp, Oryza sativa
  Clone ID: uC-osroM202035f08b1
tcgctccctcccagtctctcacttctctcccccttgtttgcctatctcgccgcttccacctccttctcttcgcttcgatctccccgacttagttgatgaggatgcagattgaagatgatggcagcaccggccgaagagggacgagctctcctcaagaaagcttgttcctcttcagccaactccgccgtctatcccctctttatcggatcccgccgatgcctccgaggagcttcttcatcggatccgcacctacatcgctgatgtgcttctccactggatcctcgtcgtgcccttccagatccatcaccacctctagctagtgatttagcggcggcttaggctaacgaggctcgtgccagcgtgcgaaaatgtgcaaccggcggtcaaattc

SEQ ID NO: 43331 - DNA, 245 bp, Oryza sativa
  Clone ID: uC-osroM202035f09b1
ttctcttccttcctcctccgtgcttaatgctctccgcattataaccacccacctctcctcctccccccacctcctctctctctatctccatctccaccgctacgcttcccagccatgggcaactccctcgcctgcttctgctgcggcggcggcgccagaggacaccaagcgcaggcacgaggccgccgcggatcattcgacggaagccaatggctactgggacaccacctgcatctacaatgaca

SEQ ID NO: 43332 - DNA, 518 bp, Oryza sativa
  Clone ID: uC-osroM202035f10b1
atctactcaagattgatagaatcgaaccatcagagctcaacattgatgagagttcaactgtgtactcacatagtggatatcttgatctgctaaaggttcttgatgaagaccacaggtcaactggtggagtaaaatttgttacaaaatgttttggaatcatcggtttcattaagttcctcggaccttattacatgctaatcatcaccgagcagagaaaaattggggctatatttggccatccagtttaccaagttactaggactgcaatgattgagctgtcaaattccgagtcgagggcaaaatttctaaattccaaggatgaagacagatacaagaagctcttgcagacaattgatcttagaaaggacttcttttttagccactcgtataatatcatgagaagtttccagaagaattttaatgatccaaaggaaggatgggacctgtatgacacaatgtttgtatggaatgagtttttaacacgaggggttcgcaacattctaaaaagtaccatatgg

SEQ ID NO: 43333 - DNA, 501 bp, Oryza sativa
  Clone ID: uC-osroM202035f11b1
tcggttcgtcaacaccttccaagagatgaagacttacgcgctgaatgtggcattgctgtccatcttcggggaggaggagatgcgctacatcgaggagctgaagcagtgctacctgacgctggagaaggggtacaactcgatgccggtgaacctgccgggcaccctgttccacaaggccatgaaggcccggaagaggctgggcgccattgtggcccacatcatctctgcccggcgcgagcggcagcgggggaacgacctgctagggtcgttcgtggacggccgcgaggccctcaccgacgcccagatcgccgacaacgtcatcggcgtcatcttcgccgcccgcgacaccaccgccagcgtcctcacctggatggtcaagttcctcggcgaccacccccgccgtctcaaggccgtcaccgaagagcagctgcagattgccaaggagaaagaggcgtcgggcgagcccgttgcatgggcggacacgcggcggatgaagatgac

SEQ ID NO: 43334 - DNA, 273 bp, Oryza sativa
  Clone ID: uC-osroM202035g01b1
tttgctcgtatataacaccccctctcctgtacacagcggctcgattccattccatttccactccccaattcacactcagatttcttcttgcggcggcggcggcggccaagaacgcgaggagaggggcggactcggtggcgacgagggatcgatggcggtgacggggacgtcggtggctgccgcggcgacgatgctggcggcggcggcggcgatcttcatcacgatcgccgtgtgcttttacctcttcctctgcgccaagaggtaccgcggcgc

SEQ ID NO: 43335 - DNA, 517 bp, Oryza sativa
  unsure (1)..(517): unsure at all n locations
  Clone ID: uC-osroM202035g02b1
cttactctttcttcttagctcttcctcccattccttcttcgattcattcctgtctccaattggaggtcacaattgcagcttgcagctagctcaaatttccattttttgtttggttgtctctcggcagcaaagcagatatagagcagaggaaagctaagctaaattagttagttagattactagtctctggcagctgggtgatcttaatttgatcaaagaagaagaagaagaagcaagtttttttagctcctgagtatattataggattaactactactaggatagtactcctatatgagaagaagatgatgcgcgggaaggatcagaaatttccggcgatgaagaaggagacggcggctgtggcgaatgaggaggtgtgggaagtgcggcccggcggcatgctggtgcaaaagcggagcccggagtcggagccaccgcccggcggcgcgccggtgccgaccatccgggtgaaggtgaagtacaacggngtgtaccacgagaactacattaactcgca

SEQ ID NO: 43336 - DNA, 414 bp, Oryza sativa
  Clone ID: uC-osroM202035g03b1
ctccttctcgtcgcgggggggcccgtctcggctgcggcggcggcggcggagtaggccacggtggtggtggtggtggtgagtggggggaccatcgccgctggtggtcggttcagtctggcgggcgggcggtctcaccggtcgttgacgaggagtttggttgaggggggccctgcggcatcagcggcggcggcggaatgtacgtgccgcagccatctctctccgatgcggtcggccttgacgccggcgaccagcctagggtttaccaggtttggcggggaagcatcgaattcttcttgcgagggaggtttatatttgggcctgatgtgagatccatatttatcactatgttcctcatctatgcaccagtggtggccctttgcgtgtttgtcgccagacaccttattgatgactttt

SEQ ID NO: 43337 - DNA, 373 bp, Oryza sativa
  Clone ID: uC-osroM202035g05b1
gtatcacgcaccgtataacgactatagatagaagacgacgatgaagtgcaggttgtggcttgtgatggtggtctgcagctgccccaaagccatagccataggaggaggagcaggaactatgtagctgaacttctacttgatgaactaaaggtgcgcaatggcggaggtagtggtcaggaaggaagtgacgaaggacattctgaaaccgatggactcctagatgtttgttattgcgagatgaggcggctacgcctcctgtatactgatgtatatactaaagtgtccgaagctcgtaagtgtaagaagacttagggccaactgctgtgagcttgatgttgtgacatacacaattgtggtagtaaatagtatacat

SEQ ID NO: 43338 - DNA, 532 bp, Oryza sativa
  Clone ID: uC-osroM202035g07b1
tcggttgaccgtgatggaaacccaagagttacaccagaggttacaagagatgtatgcttgttggcaagaatgatggctgctaacctgtacttctctcagatagaagatctgatgtttgagctctctatgtggcgctgcagtgatgaacttcgaattcgtgcagatgatttgcattgctcctccagaaaagctgcaaagcactatatagaattctggaagcaaattcctccaaatgagccttatcgtgtcatacttggtggtgtcagggataaattgtactatacgcgtgaacgtactcgccatctattgacaactggagtttctgaaattccagaggaggcaacgtttactaatgttgaagagtttctggagccgcttgagctgtgctacagatcattatgtgcttgtggtgacaaacctatagctgatggaagccttcttgatttcttgcgtcaagtatcaacttttgggctggctcttgtaaaacttgacataacgcaagagtctgatcgacacactgatgtccttgatg

SEQ ID NO: 43339 - DNA, 529 bp, Oryza sativa
  Clone ID: uC-osroM202035g09b1
tcgtgtcgccatcgccatcgccttcctcctcctcctcctccgccgccgcgcgcttcctcgccaccgcgcgcccagggccatcggcggcggacgccctcgcccacgcgcgcgagagaggggggcgagagattatcggacgagtcgctttgcggagctttctagaatggtggactgggcttcagatagcgacaatgataagttcgagtgggacacagacggtgaggctgagacctcatctgccccggccctaaggaacatagatgctcctggtccgtccacgaggctgccgcaggatgcaaatgggaaggccaacgggtcaggtgctttggttgctgaatttatgggaatgggattcccaaaagaaatgatcttgaaagcgattaaggagattggggatacagatacagagcaattgcttgagttacttctgacttatcaagcaataggcggtgacgcttcaatgggtaactgctttgcttcggcctgtgccccccagacttttgaagtcgacgaggaggaggatgatact

SEQ ID NO: 43340 - DNA, 464 bp, Oryza sativa
  Clone ID: uC-osroM202035g10b1
tcgcccaacaagcgtcaaatcgcgtcaaagccaaaaacctcatacaagtccaggaatctgtaatatattccgagacttttacacgcattccagtcatcactagtgtagcggttgctgcttcttccccggggaggtttatcggatcttgatggagacccatatcggatccgtggacggggcggcggcggcggcggacaacggcgcggtggggtgcccggcgtcggcggtggggtgcccgatgacctcggcgcgccccgcgcccgtgtcggccggcgaggcgtcgctgggacggcacctggcgaggcggctggtgcaggtgggcgtcagcgacgtgttcgccgtgcccggggacttcaacctcacgctgcttgaccacctgatcgccgagcccgggctgcgcctcgtcggctgctgtaacgagctcaactgccggtacgcggccgacggctacgcccgcgcgcgcg

SEQ ID NO: 43341 - DNA, 528 bp, Oryza sativa
  Clone ID: uC-osroM202035g11b1
ttgttcatcttcccgccatcagcatcggactattatcagattgatgatttactcaccactgaagagcagtctatcaggaagaatgtcagggctataatggagaaagaaattgcacccattatggcaacgtactgggagaaagcagagttcccatttcatgccattcctaaactttcaagcctcggtgtagctggaggcacaataaagggatatgggtgcccaggactttcaataacagcaagtgctattactatggcagaaattgcacgggtagatgcaagctgctccacgttcattctagtacactcctcccttgcaatggtcacaatagctctttgtggatctgaggttcagaagcagaagtacttgccatcccttgctcaacttactgctgttggttgctgggcattgacagaaccaaatcatggaagcgatgcaggctctttgataactacagcaaccaaggttcagcacttgaggatttgaagcattatttgttttttactaaataaaaatctcaaatttttt

SEQ ID NO: 43342 - DNA, 490 bp, Oryza sativa
  Clone ID: uC-osroM202035g12b1
tcgtgtcgcctgatcgcctccagcgaaattcttcctccatttctctctccatcgaatctcatcccagcagcagcagcagcagcagcagccgccatggattccaaggcggacgcggagtcagccacggccagggccgcccgtcgtgtcgccgcccgtctccgccaacccctacgtggtctccgccccctccgctcagccgcccgccaagagcgccagggagaatctccgggagaagctcgacgtggtcgggaggaggttcggggacgccgcgcgcaagaccgagggcatcgtcggcgacatctggcagcatctgaaaactgggccaagcattgctgatacggcgatggggaggattgctcagatatccaaggtgatagctgaaggtggatatgacaaggtgttccaccagacgttcgagtgcctgcctgatgagaagctcaagaaggcgtacgcatgctacctttcgacctttcatggcccgatcatgggc

SEQ ID NO: 43343 - DNA, 506 bp, Oryza sativa
  Clone ID: uC-osroM202035h01b1
tttgtttgtcggagtgggcgatggtccatgggatgagcagctgatgcactgtcaggaggatcgacagctgtttgacaatttccagtttgttgatttcaccaaaataataatgtcaagagaaatgcctgaaaccgagaaggaggaacaatttgctttagaagcgctgaagaagataccgagccagtacgcagccataatcagcaagaggatcagtgatctggctgcagatgcgccttcaaggatgcctcttcctccccctcctccaaggcctgttatttctacctaataattttcaggacaggggaaatgacagatgaatgtacagtaccgcaaagctagcccttggattagtttcagagccgggagatactattaacctcttaggggaagggcaggccactgtaaacctttttattttacaaagtggttgtgtaggcaatgcaagcctagtctgatgacttagcagaatacttatttaatttaaatattaattacttcattatttc

SEQ ID NO: 43344 - DNA, 484 bp, Oryza sativa
  Clone ID: uC-osroM202035h03b1
atgtgtggatgcacttaaccttctttgcagcagcttcggatgtcaaatagaagaaataatactgccagaacttgaggagatgcgtactgcccatgttgtctcaattggcacagaatcattctgtgatttgaatcctcattacagagcaggaaaacgaactgaatttacgttagacactcgaacaagtttggcactttttggatcattcacttcgactgactatgttgcttctcaacgaataaggagaaggataatgtactatcacaatgaagctttcaagaaggttgatgtcatagcaactcctacaactggcatcactgctccagaaataccacaaagttctctgaagttaggagagtccaattacgttgtgtcagcttacctgatgcgattcgtgatagctggcaatcttcttggtttgccggcgataactgtacctgttggtcattgatagcaagggcttcctataggcttgcaactgata

SEQ ID NO: 43345 - DNA, 498 bp, Oryza sativa
  Clone ID: uC-osroM202035h04b1
gtcacgtgtttcctccttcccctcctcgatttaaccgccccatctcgagtccccccatcacagcttccactccacgaaaaccctctgcctccttcgctcgctgcaccctcgtctcggcgatccatccatggctgccaggaagttcttcgtcggcggcaactggaaatgcaatgggacaggggaggacgtgaagaagatcgtcaccgtcctcaacgaggccgaggtgccctccgaggacgtcgtcgaggtggtggtgagcccgccgttcgtgttcctgccgcaggtgaagggtttgctccggccggacttctccgtcgccgcgcagaattgctgggtgcgcaagggcggcgccttcactggcgagatcagtgccgagatgttggtgaacctgcaggtgccttgggtgattctgggacactctgagcggagagcgctgatgggcgaatcaagtgattttgttgctgacaaaattgcgtacacacttttccaaggtatcaa

SEQ ID NO: 43346 - DNA, 488 bp, Oryza sativa
  Clone ID: uC-osroM202035h06b1
ctccttctcactcccaagcccgaccccgacgcccccctacccccgctcccttaccccgaccccaacctcgtgcaaagcatgctcttctccgcccagtccccgcaggcgcagccgcaggcgccgccaccccacatacaaccccccgcctccgcctccgccgaggccccctccggcgacgagaagaataagaagaagaagaagcgggcccgcgcctcccaggagatggtgcgcatcaccaaccttagcatcggcgaccacctgcactaccgctccctcgtccgccgcgcccgcctcaccttcgaggccctccgcgccatctaccaacgccaggacctcgccaccgccgggggaatccgcaaccgcttcgacctccgggcctccagcaagatgctctccaagggcctctggatgcaccgcgacatccgcaccgtcggctccatccccggcctcctcgtcggggactccttcttctaccgcgccgagctctg

SEQ ID NO: 43347 - DNA, 466 bp, Oryza sativa
  Clone ID: uC-osroM202035h07b1
ctggcttagttactggaatggtaaaaccacttgtcgacattctttggtttacatggagaatgaagcttttgtctgggcgaagaggagttgctatcttgtatgcttacatgctgctaggtttgggcttcctgagagctgtatccccagactttggtcatcttgctgggcaagaacaagagcttgaaggaactttcaggttcatgcactcgagactgcgaacgcatgctgaatcaattgctttctttggtggtggatcaagagagaaagctattgttgaggctaaattcatgaaattgcttgaccactcaaagattctgttgagaaagcagtggctttatggtattgttgatgattttgtaacaaagcaactccctcacaatgtaacatggggtcttagtttggtatatgctctagagcacaagggtgacagaactttgacttcaactcaaggagagttggcacatgc

SEQ ID NO: 43348 - DNA, 413 bp, Oryza sativa
  Clone ID: uC-osroM202035h08b1
tcggtccaatgatctctgcactaagtatcactccaaattttactcctactgtgagaaatggagttccaaaaaagaaaagtaaagctggcgtaattgctggcatagtgattggtgcgtcagttataggatcagcagccttacttgggatctttgttttggtaaagaagagaagaaaagcggcaaggcagcaagaagaactatacaacctggttggaaggcctaatatcttcagtagcgcagaactgaaattagctacagataatttcagttctcaaaatgtgattggagaaggcggatatgggccagtatataagggtaagctacctgatggaagaattatagctgtcaaacaactttctcaatcatcttatcaggggaaaagtgaattcgtgacagaagttgcaacaatttca

SEQ ID NO: 43349 - DNA, 437 bp, Oryza sativa
  Clone ID: uC-osroM202035h09b1
tcgctgactactacctcgccatgatggccgcggagccctcgccggcggcagcctccgccgttgaagacctcgaaactctccccctagactcttcctactcctccgcccccgccactgatccactcctccgcccgcctgcttccccgtccgccgcctccgccgccgctggtggggaccacgaccccttcgtcatcgacgacgacttcctcgtcgacgaggaggatgacgacgacgtcgggccccctgcgcccaccgccatcccgctggtggccgcggcggcgcgggccccggagttcgcgcggatcgccgtgtccgatccgaagaagcacgcggagcccacgtcgggggccgccggcgtgatcccaggctccgggagctacttctcctacctcatcaccacccgcgtcggggaggccgaggtccgcgtgcggcggcgc

SEQ ID NO: 43350 - DNA, 514 bp, Oryza sativa
  Clone ID: uC-osroM202035h10b1
tcggctgattcggccggccggtggcgacgaacgtcggtcgggggcgggcctcggagggcttgaagacacgactcatctactcctactcccggagaggtcctccctcgctcccaaccggccgcaaccacccgtcgaggtcctcccctcgcgaccggctggccaagaccacccggcgagctcctcccccgcgcccggcgggccgcgacctcccgacgagctcctcccacgcgctcggcccgccgcgaccacccggcgagctcctccccggcgctcagccggccatggcctcccggcgagctcctcccccactcccgaccagccgcggccacccggcgagctccttccccgcgtccggccgggcgcgaccacccggcgacctcctcccccgctcccggccggccgtggccactcggcgacctcgtcccgcactcccgaccagtcgcggtcacccgccgagctacttccccgcgtacggccggtcgcgaccacccggcgaccttctcccctgcttccg

SEQ ID NO: 43351 - DNA, 456 bp, Oryza sativa
  Clone ID: uC-osroM202035h12b1
tcgttctctctcgccctcgccgccatcaccatggagcatcatcgtcatcggggagcggtggttctcgtggtggcggcggcggcgatggcgatggcgatgtcggcggtgaggggggatttcgcggcggacagggcggagtgcgcggacaagctgatggcgctgtcgacgtgcctgacgttcgtgcaggacggcgcgtcggggggcgcggcggcgccgacgccggactgctgctcggggctgaaggcggtgctggcggcgagccgcaagtgcctgtgcgtgctcatcaaggaccgcgacgacccaaaccttggcctcaagatcaacgtcaccaaggcgctctccctcccccagctctgcaacgcccccgccaacatcttcgacttgcccaggcttgtgaacttgccaccaaactccaaggacgcgcagatcttccaacagttcgccaagcagcatgct

SEQ ID NO: 43352 - DNA, 522 bp, Oryza sativa
  Clone ID: uC-osroM202036a02b1
gattatttgaaggtaatgaatatttgactaaaattttttacatttgcgaaatctggaactatgtctgaaactgtatctgcgttgctttgtaatttgtgtcctctctttgtttgtgcatgtcaaaacctaaggcaatatacttccgacctcttaatcttgtgggcctactatttccttgtttaaccgttagaaatttagaatttgctagtccatgttgatttaacacctatgtaagtcgaattcccaatcctagcttaattttgaactacaagctattctgtgtgcaatcccactgttcatcagagttttaaattgatgtaatgtactgttctgtcaattgttgcaaagatgtcactagtttccaaaatgctaagaaatcgagttaattatgagtaaatttaaggaaaccccatgctttttacttgttggagttgcataaaacctgggttaatgccacaagtcataatacttggggttttatgcaacttcgaccataaaacatatgatttactaaaattcact

SEQ ID NO: 43353 - DNA, 520 bp, Oryza sativa
  Clone ID: uC-osroM202036a03b1
aatcgtttaggatttgggaatggctcgccgtttgattagcccctgccaaggctctggtttgcttaacgccggatttctcggcgtcttctcctcccaccattatcatcgcctgccattgtcatcatcgcataggagttcccaactgaagaattgctaccttcctaatttaaggaaggaggtctcgcattggacaagaccagccacgccttccttgtcgctatatagtgcaaggcttgccagcaagaggacaacttgttccgttgcaaccgagccgccgccttccacaaccgaagaaccagagatggatcttccaaaggagatattcctgaaagaatacaaaaagcctgattacttatttgactcggtcaatttggaatttcaacttggcgaagacaaaacaatagttacatctaaaatagctgtatctccaggaactgaaggtacctcctctccacttactcttcatgggcgtgatctgaagctgctatcaatcaaagtcaatggcaaggaccttaagagt

SEQ ID NO: 43354 - DNA, 364 bp, Oryza sativa
  Clone ID: uC-osroM202036a05b1
ccaccaccaccgtgtccagccatggcctgctgcgcctccctgcagcgcttccttcccccgtacccccacgcggcagcatgccgctgccgccctcccggcgtccgagcccgccccgtgcagtcgtcgacggtgtgcgcaccgtcctcctcgactccggcggcggacgaggccgtgtcggcggagcggttggagccgcggggggagcagtgggagggccggtactgggtgctcaaggagaagttccggactgggctgaacccgcacgagaaggtgaagctggggaaggagcccatgtcattggtcatggagggcggtattaacgagctcgacaagatgcccatggaggagatcgaggccgacaagc

SEQ ID NO: 43355 - DNA, 487 bp, Oryza sativa
  Clone ID: uC-osroM202036a06b1
ctttattttccggggttggagcaactgttgtgtgaggagatcaaatcttgatggtcattattagctgaaaaggattggatttttaccgcagagacagtatctgagctgtgtttctcagtgccttccatgttcttgcaccaaccaagctagaacttggaaaggaacaccaccatcaccaatttgcaagagaaggttctctcccttgtattataaccacaactatattgattcgagattaaagagaagggcacagtgaggatactggcatttggaggcttgttgaatccaggtgcgtgtgccacctctcccgaaaggccaaaaaaaaccactgctgcgagtgcgagtgtgcaacttttctgcaagaaacagtgagccgaacacaccggctttgttcttggctaaataaaccccaattgcggcgctgtttggattcagttcttcgcaattcttggattccccagcagcaactgttcttccccaccgagag

SEQ ID NO: 43356 - DNA, 522 bp, Oryza sativa
  Clone ID: uC-osroM202036a07b1
tttctagctttctcgtagcttcccctcgaaccaaccgtccattcccgtgggtacagctcgtgggttcttcccgatttcttccagtaggagattccctgaatccgctcctttccctaatttaatttttatgaagagagggagtaacttgttcttgcctaatttgattcgagctcaggtccataatttgatttgaattttcctggattttcttctgctgggtacatttgtgagcgattttaaaggttctttttttggctggtactttggtagaagttcagctactatcgctttaatctgctcgaattcttggttgcgtcccgttcaaaattcgtccccatgtcgtgtatttgtgggtttcattcctgcgacttccgttatttcaggactgttcggttctctcaggactttatccaactggggcagtttgagattttgtgaaaaaatggttttttctttccttctctgcgataatcttgggcttttggcgacgggagagcaatgggagcagcaacatgttctacc

SEQ ID NO: 43357 - DNA, 525 bp, Oryza sativa
  Clone ID: uC-osroM202036a08b1
gttttgttggcccccattcctcccccaccccggtgtcctcccctccgccgctcgcgtcgccgcctttttcccctatggcgctgccgaatcaggggaccgtggattaccccagcttcaagctggtcatcgtcggcgatggcgggactggtaaaactacatttgtgaagaggcatctcactggagagtttgaaaagaaatatgagccaaccattggtgtcgaagttcaccctctagattttaccaccaactgtggtaagatccgcttctactgctgggacactgctggacaagagaagtttggtggacttagggatggatactatatccatggtcaatgtgcgataattatgtttgatgtcacttcaaggctgacttacaagaatgttccaacatggcatagggacttgtgcagggtgtgtgaaaacatccccattgtcctgtgtggtaacaaggttgatgtgaagaacaggcaggttaaagcccagcaggtcacattccacaggaagaagaatcttcagtactatg

SEQ ID NO: 43358 - DNA, 427 bp, Oryza sativa
  Clone ID: uC-osroM202036a10b1
ttattgccactcggcgccgccaccccgcaccaggtaagggaggaggagtaagaagatgtcgcacaggaagttcgagcacccgaggcacggatccctcggcttcctcccgaggaagcgctcctcccgccaccgcggcaaggtgaagtcattccccaaggatgacgtcaacaaaccatgccacctcacctcctttgtcggttacaaggctggaatgacccacattgtgcgtgaggtcgagaagcctggttccaaactccacaagaaggagacctgtgaggctgttaccattattgagacacctcctattgtcgttgttggacttgtggcctatgtgaagactccacgtggcttacgcagtctcaactctgtctgggctcagcatcttagtgaagaagtaaggagaaggttctacaagaactggtgcaag

SEQ ID NO: 43359 - DNA, 507 bp, Oryza sativa
  Clone ID: uC-osroM202036a11b1
tttctagcgccgccacctccgatcgtcagccatgaccttcaagcgcaggaacggcggccgtaacaagcatggccgcggccatgtgaagtacatccgctgctccaactgcgccaagtgctgccccaaggacaaggccatcaagaggttccaggtgaggaacatcgtcgagcaggcggccatcagggatgtccaggaggcgtgcgtccatgacggatacgtcctcccgaagcttgacgccaaggtccatcactgcgtctcctgcgccatccacgcccacatcgtccgtgtccgcttccgcgagaaccgtagggaccgcaggccgccggagaggttcaggcgcagggaggataggctctactggacctatccctggtggtgctggtggacctggtgcccctgctgctgctggaccaggtggccccccttatggtgctcgcacctaaacagccgtagtcgctccttcgttactttatatcatatcctgataatggccccatggatatcatc

SEQ ID NO: 43360 - DNA, 504 bp, Oryza sativa
  Clone ID: uC-osroM202036b02b1
cgctccctgaccctccgccgccgccgccgccgatcatcatgagtaagttgcagagcgaggttctcaaggaagccatctcccaggttgttggggaatccaaggagaagggcaggaagttcaccgagaccgttgagcttcagattggtctcaagaactatgacccgcaaaaggacaagcgtttcagcggctccgtcaagctgccccatatcccccgccccaagatgaaggtctgcatgcttggtgatgcccagcatgtcgaggaggctgagaagattgggcttgactacatggatgttgaggctcttaagaaaatgaacaagaacaagaagctggttaagaagcttgccaagaagtaccatgctttcttagcattagaggccatcatcaagcagattcctcgtctccttggtcctggtctcaacaaggcaggcaagttccctacattggttactcaccaggagtctcttgaatccaaggtcaacgagacgaaagctacagtcaagt

SEQ ID NO: 43361 - DNA, 410 bp, Oryza sativa
  Clone ID: uC-osroM202036b05b1
cctccctcctcctcttcgatctcacaatctccttgttcgcggaaccgaaaatgcagtcgaggcacagggtgttcgcggaggacctgctcctgccgcgggaggcggaaggggaggaccacttcgaccgcgtcccggactcgctcgtgctcctcatcttcaaccgacttgccgacgcgcgctcgctggggcggtgctcggccgtgtccaagcggttcaactcgctcgtgccgttcgtggacgacgcctgcctccgcatcgaccgagtcatcaccgacgcggtcgacgccgacgacgcgctcggcctcgtcggaccgcgccccgacggccgcggggtgctgtcgcaccttctcaaggcgatgctgctcgccgggctcaagccggtcgggcactgtgacgtcagagtcaggggc

SEQ ID NO: 43362 - DNA, 298 bp, Oryza sativa
  Clone ID: uC-osroM202036b06b1
cctatttcgccgccgccgccgccgccgccgagatggacgacgacgacgccgccgcctccgcctcgccttccccctcgccgtcccccgtcgcctccgcgctccccgtcgccgaccccgtcaccgtcgccgcggggcctccctccggcctcctcgcgctggccctcccgatccagaagcagcagcacgcggcgtcgccgaatcctgggggtgggggtggcgggagggaggattcattaagcgtgggggcaaccggaggcgcagtacagacggaagaaagccgtgtccttcaagccttaat

SEQ ID NO: 43363 - DNA, 205 bp, Oryza sativa
  Clone ID: uC-osroM202036b07b1
catgccggcgccggagaccaccaccaccacctcacctcacccacctctgcttcttcttcttcttcttccccgtggtgtggtgtggtggtgaattgttgttctgttcccttcatttttcgttgattcgtgagcgcggcgacgtacgtacggtggtaagcatcgtcgtggattcgtctccggcgacgggggggagtgggtagggtag

SEQ ID NO: 43364 - DNA, 505 bp, Oryza sativa
  Clone ID: uC-osroM202036b09b1
ttttcctcccctccctccttcccccacccgcttcccttgccgtcgccgccgccgccgaccgccgcgggaggggaggtccccggcgccatctcccagaaatggacgcctgtttttcaacacagcttattgatggagatggcgttttcaatgtttctggattggagaacttcatgaaggaagttaaaatgggcgaatgtgggctttcatatgctgttgtgtcaataatgggtccacaaagtagtggaaagagtacacttttaaatcaccttttccgcaccaatttcagggaaatggatgccttcaaaggaaggtcacagactaccaaaggtatatggatggcgaaggcccataatattgaaccatgcactcttgtaatggatttggaaggcacggatggtcgagagaggggagaggatgacacagcctttgaaaagcaaagtgcactgtttgctttggctgtttcagaattgtgttgatcattatgtggggtcatgacattggttga

SEQ ID NO: 43365 - DNA, 506 bp, Oryza sativa
  Clone ID: uC-osroM202036b10b1
cactcttctctaggtttgttaaccagggaaagggaatgctccagcgtcaccagctgcttgcggagttcgatgccttgatcgaagctgacaaagagaaatatgctccctttgaagacattctccgggctgctcaggaagccattgtgctgccgccctgggttgcactggccatcaggccaaggcctggtgtctgggactacattcgggtgaatgtaagtgagttggcagtggaagagctgagtgtttctgagtacttggcattcaaggaacagcttgttgatggacacaccaacagcaactttgttcttgagcttgattttgagcccttcaatgcctccttcccgcgcccgtccatgtccaagtccatcggaaatggggtgcagttccttaaccgtcacctgtcgtccaagttgttccaggacaaggagagcctctaccccttgctgaactttctgaaagcccataaccacaagggcacgacaatgatgctgaatgacagaattcag

SEQ ID NO: 43366 - DNA, 527 bp, Oryza sativa
  Clone ID: uC-osroM202036b11b1
tttttaaggaggaggcggcaatgcaagaaggacgggcgaaacagcttgaagaagaaataaaggagcttcgtactaggcacaaaaaggagctgcaagatgcagcagaacacagggagctgcttgagaaggaccttgaaagagaaaaggctgccagggcagagcttgagaaaacatcttcccgtgatgcaccaaaaattccgcttccagatcagacaagaaatgctcctctcagaaagctctctagttctggcagtatcaatagtctggaagaaagccatttccttcaagcatcattagatttgtcagacaacgcttcattagagaggagaatgtctgctgaaagtaatatgtcgtattatcttcggagcatgactccaagtgcttttgaatcagcactccgtcagaaagatggagagctagcttcttacacatcgcgtttggcctcattagaatctattcggaattctctggcagaggagttggtgaaaatgactgaacagtgtgagaagttgcgtaccgaggctttt

SEQ ID NO: 43367 - DNA, 423 bp, Oryza sativa
  Clone ID: uC-osroM202036b12b1
tcttcttacttcggctgagctgagcaatggggctactgcggcgaggtagtagcggcggcggcgccgagctcgtggtggtggtgtgtgtaggctgcattgcagcgactgcgatggcggcggcggcagtcggcggcggaggaggaggggagtgtcccaagtacaaggactcgaagcagccgctgaacaagaggatcgacgacctactccggcggatgacgctggcggagaagatcggccagatgtcgcagatcgagcgcgagaacgccaccttcgacgtcatgcgcaactacttcattgggagcgtgctgagcggcggcggcagcgtgccggcggcgcaagcctcgccggcggcgtgggtgtcgatggtgaacgagatgcagcgcggcgccattggcgacccgcctcgggatccccaagatctac

SEQ ID NO: 43368 - DNA, 456 bp, Oryza sativa
  Clone ID: uC-osroM202036c02b1
cgcatagaaaggcgcgtattttttcgcctttcttcgcgcctccgcgcttgggctacttttgtgccctcactcccttgtccgccgccggcgtaggatcaacccaatgcgccgtcatgagggagtgcatgtcgatccacatcggccaggccggtatccaggtcgggaacgcgtgctgggagctatactggctggagcatggcattcaggctgatggtcagatgcccagtgacaggactgttggtggcggtgatgatgctttcaacacctttttcagtgagactggtgctgggaagcatgctccccgtgctgaatttggtgatcttgagcctactgtgattgatgaggtgaggactggatggtaacgccaggtgtttcaccctgagcagctcatcaatggcaaggaggatgcagttaacaactttgcccggggaactacaccattggcaaggagattgt

SEQ ID NO: 43369 - DNA, 516 bp, Oryza sativa
  Clone ID: uC-osroM202036c03b1
ccatgttcaacgagccaaaccctaaaaaactaaaattccccaaactctgtcgccgtcgccatggaccgcgatgcgggcggcggcggcggcggcggcggcgaccctgctaccggcggaccagctgaattccctggcgaggccaagataaccctgcgacctgatttcctcctcttacaagcagctgccagaaaatctaaaagatatgctattcagcaaagtattctctacaaagagcacaaaaggcaatctagacatcaactaagaggagcacagccatcaacctcccaaaaacctaggcatgcagaagctggaagtaagactcatgttcgtcaaagtgttctctattcagagcgtaaaaggcaacctagacatgaacgaggaggaacacaaccaccaaccttactgactgcgagtgagcatgattctacaactgtggagccatcaagacttaaggaagcttcaccatcactgtcagatgaactacgtgaacttgaggaataccgcaagacgcatacc

SEQ ID NO: 43370 - DNA, 519 bp, Oryza sativa
  Clone ID: uC-osroM202036c06b1
aattctttctcactcccagatacctgctgctgccactagcccactaccatggatccttgcaagttccggccgtcgagctcgttcgacacgaagacgacgacgacgaacgcgggagctccggtgtggaacgacaacgaggcgctgacagtggggcccagggggccgatcctcctcgaggactaccacctgatcgagaaggtggcgcacttcgcccgggagcgcatcccggagcgcgtggtccacgcccgcggcgcctccgccaagggcttcttcgagtgcacccacgacgtcaccgacatcacctgcgccgacttcctccggtccccgggcgcccagacccccgtcatcgtccgcttctccaccgtcatccacgagcgcggcagcccggagacgatccgcgacccgcgcgggttcgccgtcaagttctacacccgcgagggcaactgggaccttctcggcaacaaacttcccgtcttcttcatccgcgacggcatcaagttccccgacgtcattcacgcc

SEQ ID NO: 43371 - DNA, 479 bp, Oryza sativa
  Clone ID: uC-osroM202036c07b1
tgttctagatcgcgagcgccgcccttttttttttttttttttgtttcaacaccggatcattctttattccaaaagataacaaacaatgttatttacgatcgcaccgctggtattgcagcaaacttaacattataagtgagcctgctatgcgtgattatcattaacacagggtgctccttgtagggctcttacaacaccagggaattcaccatttcacctaggtggcctaaatgactatatgcctgaatcacctttaaacctatccaaattccaaagatacaacaatagcaggaaatgctaagtcgactagtttccgtaaatgacaccatttgggctcacaggagagccattgtgttgaagatcctcttcctcaacttctgacaagaaaccgttctcaaagaatgctgaatgaagggcctgtatacactgtttcgcctcgctatcatggaccaccaatgaaatgttcaccttggatgccc

SEQ ID NO: 43372 - DNA, 377 bp, Oryza sativa
  Clone ID: uC-osroM202036c08b1
gtttccatcagtctgattgttggtgtcatcttgaagtgtataccagttggttcaggtgaaacctctgcaactccaaatggatacaggccacttgccaatggccctgatgacatatagctgaagagtaatcactaataagggaaagtagaatccagggtgcaatacagcatccagctgcccagctcagttcagttgttttggaatacactaaccaaccactgattttgttcaaattttgccaaactcctgtcatgtaattgttactacatcacacgttactgatgtgcacccttaccactctgctttcaacttcagacttcattgtatcagtgaattcatattatcattatgacggttggtggtttggattcactctg

SEQ ID NO: 43373 - DNA, 475 bp, Oryza sativa
  Clone ID: uC-osroM202036c10b1
tttgatcagaaagagagacaagagaagagctagggtttcatctcatctccagccatggcgtccgccgcctccccgccgcgctccggcgacgcctccccgtcctcccctctcctcccttccccgacgtcccccgaccgccgcagcggcggcggcggaggcggaggacgcctgcttccggggctgcgcggcgcggcgcggttcctgggccgcacggggagccgccgactgatgcgggagccgtcggtggcggtgcgggagacggcggcggagcacctcgaggagcgccagaccgactgggcctactccaagcccgtcgtcgtgctcgacgtgctctggaacctcgccttcgtcgccgtcgccgcccgcgtcctcgccgcctcggtcccggagtccccctcggtgccgctccgcgtctggctcgccgggtacgtgctccagtgccttttccacgcctctgcgttaccgtcgagtacag

SEQ ID NO: 43374 - DNA, 364 bp, Oryza sativa
  Clone ID: uC-osroM202036c11b1
ttatttcaccaccaccattcctccccccttctgccctcctcctcgcgacgcgaaggcgaccaccacgcccatgccctccgttcctcgcggcggcgcgaccgcgaccaccaccaccagcagcagcagctagccccatggccaagtcgacgcccgctgcggcggcggcggcgcccgaggaggcgacggcggcggcgctgcgcctccgcctgcgccgcctcgtggccgccgtgacagccggcggcgtctgaggggaggaggccttcgacgaggcggcgtcagcgctcgcggcgctgagagacgcggagctggggccaccgccgaaggaccgttcctgggcccgggctgataggacgatgagtgggca

SEQ ID NO: 43375 - DNA, 383 bp, Oryza sativa
  Clone ID: uC-osroM202036c12b1
tcttatgcaggcagcggagagccgagccagttcactctgtcacactccacactctgccactgccactctccagctgcagcgcagcagtgcgtgtctcctccccccgatggcctcgcggatcttgctccccatcctcctcttcctcctctgctcgcgtggcggcagcggggcgccggcggcgaggcggggaatgcgcgtgccgccgttgggtggggacccggtcaagttcgacttgtccccgttcttgatcgagtacaagagcggcagggtgaagcggctcatgggcaccgacgtggtggcggcgtcggcggacgtgctcaccggcgagtcctccagggacgtccccattgatccggacaacgatgtccgcgcgcggctctacc

SEQ ID NO: 43376 - DNA, 518 bp, Oryza sativa
  Clone ID: uC-osroM202036d01b1
ctcctccggctcttcttcagtatcgaatcctctcttctcctcgtgcccaccaccaccaccgtagcaatggcgggcaacgggccgatcaacaaggaggacccgctcaactggggcgcggcggcggccgagatggccggcagccacctcgacgaggtgaagcgcatggtggcacagttccgcgagccgctggtcaagatccagggcgccaccctccgcgtcggccaggtggccgccgtcgcccaggccaaggacgccgccggcgtcgccgtcgagctcgacgaggaggcccgcccccgcgtcaaggccagcagcgagtggatccttaactgcatcgcccacggcggcgacatctacggcgtcaccaccggcttcgggggcaccttccaccgtcgcaccaaggacggtctccgcctccaagtcgagctccttaggcatcttaacgccggaattttcggaactggctccgatggccacacgctgccgttggagaccgtgcgggcggccatgctcgtgcgcat

SEQ ID NO: 43377 - DNA, 501 bp, Oryza sativa
  unsure (1)..(501): unsure at all n locations
  Clone ID: uC-osroM202036d02b1
aaacgcgaacacgcgaggacatggacgacatggccaagctagctcagatgccgcgcgctcctctgctcgtcctgctgctgatgctgggggtcggcgcggcggtggccgtgccggagtacagggaggcgccgcacttcaccaactcggcggcggcgcggtgcccgccgccgctgccggcgacggacgcggacgcggcgtgctcgccgcacgcggcggtgcacgtggccatgacgctggacgcgccgtacctgaggggcaccatggccgcggtgctctccgtcctccgccacgcctcctgcccggagtccgtccacttccacttcctcgcctcctcctcctcgtcgccggaggcggcggcggcggtgcgggagctgagggacaccgtgcgggcgtcgttcccgtcgctggcgttccgggtgtacccgttcgacgagtcccgcgtcgcggggctcatctccaccttcattcgcggggcgctcgaccgnccgctcaactacgccc

SEQ ID NO: 43378 - DNA, 440 bp, Oryza sativa
  Clone ID: uC-osroM202036d03b1
tctatactcgagctcttcttctacttaaaagaaaaaaaacacgcatatctagtagtactgttctagtgttcttgtacttctattcgtgtgctactactgcatctgtgagtctgtgtgactgtacacatctgtaatggagtgcgaaaccgggcttgttcgttccctgaacggcgacgggctgtgcatgtcgtcggtgtcggcgccgccgcgggccgacccactgaactgggggaaggcggcggacgagctggcggggagccacctcgacgaggtgaagcggatggtggaggacttccgccagccgctggtgaagatcgagggcgccagcctgacgatcgcgcaagtggccgtcgaggccgccggcgcctgcgacctcagggtggagctcgaccagtccgcccgcggccgcgtaaggccagcagcgactgggtcatgaacag

SEQ ID NO: 43379 - DNA, 527 bp, Oryza sativa
  Clone ID: uC-osroM202036d06b1
tgttttttggccccacagccataatcactgaaatcaatgagaagatcggtgctactggggtagtcagccaagaatgcaagacagttgtttctcaatatggacaacagatcctagatctgttgcttgctgagacacagccatcaaaaatctgctctcaggttggtctgtgtacttttgatgggaagcatggtgttagtgctggaattaagagcgtagtagatgatgaagctggggaatcgaatggtctccaaagtggtcccatgtgcaatgcctgtgagatggctgttgtatggatgcagaaccaacttgcacagaacaagactcaggatctcatcttgaactacattaatcagctctgtgacaagctcccaagtccaatgggagaatcatctgtggactgtggcagccttgcatccatgcctgagatttcattcaccattggaggcaaaaagtttgcactgaagccagaagagtatattttgaaggttggtgaaggagctgctgcccagtgcatcagttgattcaca

SEQ ID NO: 43380 - DNA, 303 bp, Oryza sativa
  Clone ID: uC-osroM202036d09b1
ctcctccccctctcacttgccctgcccaagcccaagagaggaatccaagctgctgcattgacggcggcggcggcggcggcggcgaggagatcgggagcaatggcggaggaggcggcggcaggcgggctgtactactgccacatgtgcgcttcgacggtgagcgccgtggcggcggcggagggggaggtggagatcaagtgcccgtactgccacagcggcttcgtcgaggagatcgagtccgcgcgcggcgtcgccaccggcggcggcggcgcgatctcctccgtctgggcccccatcatcgac

SEQ ID NO: 43381 - DNA, 530 bp, Oryza sativa
  Clone ID: uC-osroM202036d10b1
tttcaatcggccaatcctccccaccccgacttgtataaagtagcccgctgccggagccccgacgtgccacgtgctgacgtcatctggccgtggttggacacgtgtcatgacatccaaggcttcaaagctggcggagcagcagagggaaccatttcttggagtcgccggccgccctgctggtggtgaccgcgcggttgcgccggccgacggcgaacatgacggcggtttctcctggctgacggccctcggttttgtctttctaactttcaattcaggtatggcgatctaccgctcggacggcgacctcgccgccgtgtccttcgtgtccttctcctacatcgacctcgtgctgctcttcgtctgcttgcgcatgttcgagaaggcggagcccaactcgcgggagagggggaacctcaaggcggccgtgtggatcctgacgacgctgctcaccgttgttttttcctataaggtcgcggcgatcatgcccgtgcccgtgcaaatactggtttgggcgatggccggcgcgactg

SEQ ID NO: 43382 - DNA, 528 bp, Oryza sativa
  Clone ID: uC-osroM202036d12b1
ttctctccctccgctcctccgctcctcgcctcttttacccgctcttccccccgatctccccggactcccacagccgcagcgaacaaatcccgcgcgggttgggaagagcgagctcgtgaggagagcagagggaaagcgcgagggggaaggaggaggaaaggtcagactaagtttgcgttgaagaacaaaggagaggaaaaatgtcgcctgctgaggcatcgcgtgaggagaatgtgtacatggcaaagcttgccgagcaggctgagcgttacgaggaaatggtcgaattcatggagaaggtggcaaagaccactgatgttggtgagctcaccgttgaggagcggaacctgctttctgtggcttacaagaacgtgattggtgctcggagggcatcgtggaggatcatctcttctattgagcagaaggaggagagccgtgggaatgaggcatatgttgcatcaattaaggagtaccgtagcaggattgaaactgagctcagcaagatctgtgatggtatccttaagcttc

SEQ ID NO: 43383 - DNA, 511 bp, Oryza sativa
  Clone ID: uC-osroM202036e01b1
gtttttgctgctggagttcctgcaggagcgtgcgctgtacgcgaacaaggagatcctggaggcgaagctccgcctcctcagcgggaccaacatggtggactacgccatggacatccacaagtccctccacgacaccgacgaggtccccgacgacatggtcaggcgccgcaccgacgtcgtctccaggctcagggcgctcgacgaggccaccgcccccatcgtctccttcctccagaaccagcagctcgtccaggagctcaggccagacaagcagtacaacctccacatgctccaggaccgcttccagattggtcctgagcagattgagactctgtatcagtttgccaagtttcagtttgactgcggtaattactcagatgctgctgtctacttgtatcaataccgtgctttgtgcacgaacagcgagaggagcttgagtgccctgtggggaaagctggcagccgagattttgatgcagaactgggatgttgcactggatgagctcaaccgt

SEQ ID NO: 43384 - DNA, 497 bp, Oryza sativa
  unsure (1)..(497): unsure at all n locations
  Clone ID: uC-osroM202036e04b1
ggttttgttcgcaagtggatctcacgttttgaagtctggccgtacctggaaacattcactgatgatgtcgcgcacgaaattgctggagagctccaggccaatcctgacttgatcatcggaaactacagtgacggaaaccttgttgcatgcttgcttgcacacaagatgggtgttacccattgtaccattgcccatgcgcttgagaaaaccaagtaccccaactctgacctctactggaagaagtttgaggatcactaccacttctcatgccagttcacaactgacttgattgcgatgaaccacgctgacttcatcatcaccagtaccttccaagagattgccggaaacaaggacactgttggtcagtatgagtctcacatggcattcaccatgcctggtctgtaccgagttgtccacggtattgatgtttntgacccgaagtttaacattgtctcgcctggtgcggacatgttcatctacttcccttactctgagtc

SEQ ID NO: 43385 - DNA, 467 bp, Oryza sativa
  Clone ID: uC-osroM202036e06b1
gatttttctcccctcgcctcctcgtcctccccctcctaggggatcgccggagaggaatcgcgcggaggaaaaaaaaagaaaagggcttcctcgtcgtctaagttaaaaggaagccatggagcacaaggagactggatgccagcagccagaaggcccgatcctttgcatcaataactgcggcttctttggcagtgcggctaccatgaacatgtgctcaaagtgccacaaggagatgataatgaagcaggagcaggccaagctggcagcctcctctatcgacagcattgtcaatggtggtgattccgggaaggaaccaattattgctggtcacgctgaagtagctgttgctcaagtcgaggtgaagacgcttgttgcgcagcctgctgagattgctggtcctagtgagggggtcacggtgaaccccaaggggagggaaggaccaaatcggtgctccacttgtcggaaga

SEQ ID NO: 43386 - DNA, 496 bp, Oryza sativa
  Clone ID: uC-osroM202036e08b1
ttcttcggaggtttggaaggtttgaccgtgagattgacattggtgtccctgatgaggttgggcggcttgaggttcttcgtattcacactaagaacatgaagctagctgaagatgttgatttggaactcattgcgaaggatactcatggatatgttggtgctgatcttgctgccctttgcactgaggctgctcttcagtgcattcgtgagaagatggatatcatagatcttgaggacgagacaatagatgctgagatattgaactcgatggctgtcacaaatgaccatttcaaaaccgcgcttggtacaagcaacccatctgctcttcgtgaaactgttgttgaagttcctaatgtctcatgggaggacattggtgggctggagaatgtcaagagggagctgcaggagactgtccaatatccagtggagcacccagagaagttcgagaagtttggaatgtcttcatccaaaggagttctgttctatggcccttctgc

SEQ ID NO: 43387 - DNA, 513 bp, Oryza sativa
  Clone ID: uC-osroM202036e09b1
aatgtagaattggcacatcagatataccttgaagctaagaagtttgccaaaccttacaatcttcgagttgctgctgtatatggtggggtttccaaatttgatcaattcaaagaactgaaggcaggctgtgaaatagtcattgctaccccagggagattaatagacttgcttaagatgaaggcattgaagatgtttagggcaacttatttggttcttgatgaagctgatcgcatgttcgatcttggatttgagcctcagataagatccatcgttggtcaaattagaccagaccgacaaaccttgcttttctcagcaacaatgccatacaaagtggaacgtttggctagagaaattttgactgaccctattagagttacagtaggtcaggttggcagtgctaatgaagacattaagcaagttgtaaatgtactcccttctgatgctgagaagatgccttggcttctggaaaaacttcctgggatgattgatgatggagaccgtcttgtatttgca

SEQ ID NO: 43388 - DNA, 501 bp, Oryza sativa
  Clone ID: uC-osroM202036e10b1
ttctcgccgctgattcgattcgatccgatccgatccaaggggaggggaagcaatggcgacgaagaggagcgtggggacgctgggggaggcggatctgagggggaagaaggtgttcgtgcgggccgacctcaacgtgccgctcgacgacgcccagaagatcaccgacgacacccgcatccgcgcgtccgtgcccactgtcaagttcctcctcgagaagggcgccaaggtcatcctcgccagccatctgggccgtccgaagggtgtcacccccaagtacagcttgaagcctcttgttccacgcttgtctgagctacttggagtcgatgttgtgatggccaatgattgcattggtgaggaagttgagaaattggctgctgctttgccggaaggtggagttctactcctagagaatgttagattctacaaggaggaagaaaagaatgatcctgagtttgccagaagcttgcagctgtcgctgacctttatttaaatgatgctttt

SEQ ID NO: 43389 - DNA, 277 bp, Oryza sativa
  Clone ID: uC-osroM202036e12b1
tttccacccacccgcagccgccggcgagttcgagcggcggccaccgggcgggcggcggggcggcggctcggctcccctgatctccctcccctgcgccgctgcgcggtatggacctccaggatccagccgcggacgccgtcgcggccgagccactcaccgttgccgagaccgacgaccagccgccgccgccagcgccgcctctggaggcggagggtgttgtcgtcgcggaggaagacccgctgtcgcatccgccccttgaggaggtggaggaggatgt

SEQ ID NO: 43390 - DNA, 521 bp, Oryza sativa
  Clone ID: uC-osroM202036f01b1
atttcttaagctccggcatcatctccatcatctcatagtcctcttcctcctcagttcatccttgcctgttgcctactccctcctcaatcctgcagaagtttctgaagagatcaattaccaagaaactgagaggaaacacacagattatctgcacacagatcatcaccatacttgcatctgtcgttgagagaagatgatcccgttcacaaagcagagaagcaccaagatgaaacgtgccctgcactaagctatgctgttcggcaggagctcggtgaggccagtgatggaagcacgccgccgcacgccaagattctgcaaggcggactcggagtcggagcagaggaagctacggcgtgtcaggcttcccttctggtcgtgcccgccgaatcggtcgtcgggcacctgacctgacctgacctttcttccttttcctttgcatctttcacttcctcttcctcttttctcggtgtctgaatctttcctgagttgttgaacagcctgaggaagacacgggctacgat

SEQ ID NO: 43391 - DNA, 428 bp, Oryza sativa
  Clone ID: uC-osroM202036f02b1
ctggttttatgtgatctcatatatctgggggaatcatcttctccgcgtcaatccgccattgttactagtagtagtagagctctcttgttgttgttcttcttcttcgtgttcttcttcggttgattaaataatcgtagcagcagaagaagcagctgtttgtagacaaggtgtttgtggaaatgtcgtcgtcgtcgctgtcgccggcggggtcgtcggacggggactcggcgggggtggtggtggcggcggaccaccggagggagaagcggcggctgtcgaacagggagtcggcgaggcggtcgcggctgcggaagcagcagcacctggacgagctggtgcaggaggtggcgaggctgcaggcggacaacgcgcgcgtgctggcccgcgccaagcaaatcgccgggcagtaccccccccgcgcgcatgag

SEQ ID NO: 43392 - DNA, 507 bp, Oryza sativa
  Clone ID: uC-osroM202036f03b1
gttttgtcgggcaaccgtaacttcgagggtcgtgtgcacccattgacccgggctaattaccttgcttcaccgcctcttgtggttgcatatgcacttgctggcactgttgacattgattttgagaaagagccgattggagttggaaaggatggtaaagaagtcttcttcagggacatatggccctcaactgaagaaattgcagaagtggtccaatctagcgtactgcctgatatgttcaaaagtacatacgaggctattacaaaaggcaacccgatgtggaatcagctgaccgtgcccgaagcatcgctctattcgtgggatccaaactccacctacatccatgagcctccatactttaaggacatgaccatgtccccacctggcccccatggggtgaagaatgcctactgcttactgaactttggggacagcattacgacagaccatatttcaccagcaggtagcattcacaaagacagccctgctgccaagtacttgcttgagcgt

SEQ ID NO: 43393 - DNA, 447 bp, Oryza sativa
  Clone ID: uC-osroM202036f04b1
atctttgtgaagcaaagcgatcgatggaggcgcgagtgcttgtgttggtgaccatggcgatcgccgccgcgtgctgggccaccggcggcgtggccgcggcggcgacggcggcgacgacgacgacgacgtcccgcctcaagggcctgcgcgtgcacctgacgcacgtggacgcgcacggcaactactcgaggcaccagctgctgcggcgggcggcgcggcggagccaccaccgcatgtcgaggctggtcgcgcgggccaccggcgtgccgatgacgtcgagcaaggcggcctgcggcgacaccaacgagggcgacgggttctcccagggcgccgggctcgtcggcctcggccgcggcccgctctcgctggtgtcccagctcggtctggacaagttcttctactgcctcaccttcctcgacgacaccaacaacagcccgctccttctcg

SEQ ID NO: 43394 - DNA, 532 bp, Oryza sativa
  Clone ID: uC-osroM202036f05b1
ccaagattccacggatattttttctccccctgctcccgtcgccatcgcaaaggagaaaaaaaaaagaggaggaaggaaggaaggatgagcgccacggcggtgtcgtcgctgaacccggacgcgccgctcttcatcccggcggcgttccggcaggtggaggacttctcgccgcagtggtgggacctcgtcaagaccaccgcctggttccgcgaccactggttccacgagcaccagcagctcgacgagatggccgactccctcgccctccacgacgccgccgccgacgacgacgacctcgccggcctcctccccgacgacgccttcgacgacgacgacgacgacgacctcttcttcgaccagacccataacctcctcgtcgatcccccgcagccgcccgccgctctcaagactgatgcggtgctcaaggcgctgagcctggtgtctcccaagggcggcgacgcgccgcgggggctccgggagaagccccggcactccgagaagcccaccaagtacgccggcagcccgaggagcg

SEQ ID NO: 43395 - DNA, 542 bp, Oryza sativa
  Clone ID: uC-osroM202036f07b1
tcacgttgaagtaccctatcgaacacggtatcgtaacgaattgggacgatatggaaaagatctggcatcacaccttctacaacgagcttcgcgttgcccccgaagagcatcccgtcctcttgactgaggcgccgctcaacccaaaggccaaccgcgagaagatgacccagatcatgttcgaaacgtttaacactcccgcgatgtacgttgcgattcaagctgtcttatctctatacgcctccggtcgtaccaccggtatcgtgatggactctggcgatggtgtcactcacaccgtacccatttacgagggttatgccttgcctcacgcgattcttcgtctcgatcttgcgggtcgcgatttgaccgattacttgatgaagatcttgactgaacgtggttattcgtttaccaccaccgccgaacgcgagatcgtacgtgacatcaaggagaagctcgcttatgtcgctctcgacttcgaacaagagatgcataccgctgcatcgtcttcgtctctcgagaaatcatacgaattgcccgacggc

SEQ ID NO: 43396 - DNA, 512 bp, Oryza sativa
  unsure (1)..(512): unsure at all n locations
  Clone ID: uC-osroM202036f09b1
tgtttgtgtcagcaactacaaagagtctatatagctactaattaatcatcctcgatcgatcgatctcggtcgtgtatagcagtagcactgcatatggcaataagcagattaatggtgacgaagaagcagcaggcggccttgttggccgtggtcgccgtggcagctctggcgcaggtcgcggcggcggcggtgcatccggtgggaggcaatggcgcctgggacaccaccggcaactacaatgcctggtccgtctcccaaaagttctcccaaggcgactccatcctgttcacctatccctcctcgcacgacgtggtggaggtccccaaggccagctacgacgcctgctcacccgccaacgccctcgcctcctacaccggcggcagcaccaccgtcaagctcgacgccccgggcaagcactacttcatctgcggcgtgcccggccactgcgccgtcggcatgaagctcgaggtcaccgtcgncgtcgtcaccgtcaccaagcccaggcacaagaa

SEQ ID NO: 43397 - DNA, 553 bp, Oryza sativa
  Clone ID: uC-osroM202036f12b1
tctagatcgcgagcggttgcccttttttttttttttttttccatcagaatgaacaaacagaagttttaatttctcatagctcacaaagtcatcaatgatacaagcaaagttttgaacaaaggaaacccccaagagaatgagaaaagaaagaagagaaaaaattcactctagaagaggaacaaggaattggacgacccttaacaagtccaatgcatgagaactcaaaaacagttctctaattatgctgcaaggtggtgatctaaagagtactattataacttatacatctagagtacttcccaaagccaaggtagggtaattaaccaattaaacacaccgattaaaatgccgagatgagagagagagaaaaggtcccccatatatgttcttgcaccaccacaccgccatggatatgccgcaagaacttcaagctcttctcatgtatctatccccccacaccgtatgccctatatacaaaataagctactacataccacccaaggaaggagatcaagaagccaagaagccaagtagagctagctagctagcaaat

SEQ ID NO: 43398 - DNA, 426 bp, Oryza sativa
  Clone ID: uC-osroM202036g01b1
gtttgtgtgcctctaccaagaacaataagaagccttgcattggtagccatgatcacggtggtggacctgtaccacgtcctgacggcggtggtgccgttgtacgtggcgatgacgctggcgtacgccttcgtccggtggtggcgcattttctgcccggaccagtgctccggcatcaaccgcttcgtcgcgctctttgccgtcccgctcctatgcttccacttgatctccaccaacaaccccttcgccatgaaccttcgttttctcgacgacgacacgctccagaagctcatcgtcctcgccctcctcgcgctctggtgccgccttttcgcgcgcgggtccctcgactggctcatcacccttttctccctctgcaccctgcccaacaccctcgtcatgggcatcccgctgcttaaggggatgtacgcc

SEQ ID NO: 43399 - DNA, 524 bp, Oryza sativa
  Clone ID: uC-osroM202036g02b1
gaaactttcctcgtcggcgaggagcggcgagatcccccgggccccggccatggaggggctcctgtccaagctccggagcctggacgcctaccccaaggtgaacgaggacttctacagccgcacgctctccggcggcatcatcacgctcgcctcctccgtcgacatgctcctgctcttcgtctccgagctccgattatatcttcatgcggtcacagaaacaacactaagggttgatacctcaaggggagaaacacttcgcataaattttgatgtcacctttccagcccttcagtgttctataataagccttgatgcaatggacatcagtggacaagagcaccttgatgtgaaacatgatatattcaagcagagaattgatgtccatggtaatgttattgcaactaagcaagatgcagttggtgggatgaaggtggaacagcccctacagcggcatggcggcaggcttgaacacaatgagacctattgtggctcttgttatggtgccggagaatctgatgagcagt

SEQ ID NO: 43400 - DNA, 494 bp, Oryza sativa
  Clone ID: uC-osroM202036g03b1
cgaatcctctcttctccttgtttccaccaccaccaccgtagcaatggcgggcaacgggccgatcaacaaggaggacccgctcaactggggcgcggcggcggccgagatggccggcagccacctcgacgaggtgaagcgcatggtggcgcagttccgcgagccgctggtcaagatccagggcgccaccctccgcgtcggccaggtggccgccgtcgcccaggccaaggacgccgccggcgtcgccgtcgagctcgacgaggaggcccgcccccgcgtcaaggccagcagcgagtggatcctcaactgcatcgcccacggcggcgacatctacggcgtcaccaccggcttcggcggcacctcccaccgccgcaccaaggacggccccgccctccaagtcgagctcctcaggcatctcaacgccggaatcttcggcactggctccgatggccacacgctgccgtcggagacggtgcgggcggccatgctcgtgcgca

SEQ ID NO: 43401 - DNA, 531 bp, Oryza sativa
  Clone ID: uC-osroM202036g04b1
agttgtctcaataagtttgcctgccctaagtgtgctgagatcatccttaatagcgatgatgctaaatcaggtgaacctatcgttgacagaaccactttttggccatccatcttccgttgagctgttgaggttccctggaggaattacagtaattcctgagcagtctggttctgtatgggcggatcctcttttcaactttgtgttgaacaattccatttatcagatcttgggtaatattacagagctaaaggaccagttgaagcttggattgaacttgaggtcctacgagaaagtatatttgcagttcaggaatgagattggatcttcagttgatgccccggcaactattgaggcatctgttctagatgggagcagcattcttttaccatatagattgaaacaactagctcagctaatcaaagaacccaatgcaaggaaccttgggcttaatcactctgtatttggtaaagtaaaaggtgttcaactgtcatcatacctacagcattcgatctcagatttatcttcgagtcc

SEQ ID NO: 43402 - DNA, 485 bp, Oryza sativa
  Clone ID: uC-osroM202036g05b1
ggttatttcctggtgagcagcttcaagtcgtggtggacgaacaggtacatgcaaatcttccagcggctcagcaagtacgaattggttgacatcgacaatgatgacgaggtccgatgttaccggagcgtggtggtcgggccgacgttccacaaggagctcggtgtggacgcgtccaggacgccgtcggggtactccatggtggacttccgcacgatgttgcgtggagcgctcgggctggagcgcgctgtggctgagcccagcggcgaccggtgggacatccggcgccgcccacgactgctgatcatctcgcggcgcaacttccgtgcgttcctgaacgagcgtgccatggcggacatggtcatgagcctgggcttctacgtgcgtttgggcgagccggacatcagcacggacgtgtccaagttcgcccggctggtgaactcggcggacgtgatggtggccgtgcactgtgcatggctgaccaacat

SEQ ID NO: 43403 - DNA, 508 bp, Oryza sativa
  Clone ID: uC-osroM202036g07b1
gttgattcctcccctccaccgtctccgcctctctcgctcgcgccgccggccgccggcgatcctcccgccggagcacgctcgcctgacctggctgcctccgccgcttcgaatcgaagcccgcagctccccctccctctcttcctctccagacagtcccctactcccctctgctgcactggacttggggtggggtggagcgggagatccatccaagatagctcggagtgagtgatttccccttttttctgaaggttgtagaagcttggaggatgccgaggcgggagggtggtcgctctcgctccgccgcctacctcgtcctcttcgcttcctgccttttagctgttgcggcggcatcacaccaggaatttcatgaagctgctggatccagaactcttcttatgtcacatgaacacacaaatcaagtgcattgctcaagggaaagaagccgtgcagcttggaaagctattgatgagaatttgatgccctttgtggaaaaagagaaatatga

SEQ ID NO: 43404 - DNA, 473 bp, Oryza sativa
  unsure (1)..(473): unsure at all n locations
  Clone ID: uC-osroM202036g09b1
tttttcatcaccagctcagctgtggccggccgcgcgcgatccaagttgctagctagctaagcttttgtaactgagagtgagctagctaggtagctgggtattgggtattatattgcgagagatagagagagatgagctgcaacgggtgccgcgtgctgcggaaggggtgcagcgacgcgtgcgtgctgcggccgagcatcgagtggatcgacggcgcgcagccgcaggccaacgccaccgtcttcgtcgccaagttcttcggccgcgccggcctcgtcgcctccctcgccgccgtccctctccaccatcgtccagcgctgttccggtcgcttctgtacgaggcgtgcgggcggacgataaacccggtgagcggcgccatcgggctcatgtggacgggcaactgggacctctgccaggccgtcgncgacgccgtccttcgcggcgactccctccgcgccctctcggccgtgcca

SEQ ID NO: 43405 - DNA, 525 bp, Oryza sativa
  Clone ID: uC-osroM202036g10b1
ctctcctgcgcgggcgagtcgtcctcctcgtcctcgtcgtcccctttctctgctcccgcgagatctcacccccgctgcggcgacgcggccatggcggggaggaactaccacggctacggcggcggcggcggcgggggcatgtccatggtggtggcgagcacgccggggcaggagctggccctcaccaactgcgcgtacgtctcctccgccgacatccgccgcttccccaacgccctcgccctcgtcggcgacgccttcgtcttcaccctgcgtgcccatgatgctgtttctgctggaagcatcgcattgaatgccattcagcgtcgccagacgaaggtttcagctggggattcaatcactgttagcagttttgcccctcccgatgatttcaaattggcattgctcacattagaactagagtataccaaggcaagaaccaaccgaaatgaggagctggatgcttgtgtgcttgcccaacaacttcgaaggagatttcttgatcaggtcatgacatctggggcaaga

SEQ ID NO: 43406 - DNA, 374 bp, Oryza sativa
  Clone ID: uC-osroM202036h01b1
tgtagatccgatccaggaagagctcgccgccgccgctgccatggcgctctgggacgtgacaagcacagggaagagtggggaaagccgatgcccaaagttctgtcttggtactgaggtgtttctgagctttggtaattcagttgcttcaacccgcttcttgctccaagatgaattcaacatacagacaactaaatgcgataactgcattattggcttcatgttttgccttcaacaaattgcttgtattttctctatagttgccgctattgttggtagtgaagagctttcagaggctttccaaatcctttcctgcttggctgatatggcctactgttcgggttgggcctgtttgcagacccaacacaaaattgaaa

SEQ ID NO: 43407 - DNA, 368 bp, Oryza sativa
  Clone ID: uC-osroM202036h02b1
gtttatataagggctctgtataatgacatgtcaagatatgtcttctgtgctgggtacatgccatgcattgggaagagtggtgaaagccgatgcccagagttctgtgttgctactgaggtgtttctgagctttggtaattcagttgcttaaacccgctttttgctccaagatgaattcaacatacagacaactaaatgcgataactgcatgattggctttatgttctgcctgcaacaaattgcttgtatcttctctatagctgccgctattgttggtagcgaagagctttcagaggcttcccaaatccttttctgcttgactgatatggtctactgcttggtttgggcctgtatgcagacccaacacaa

SEQ ID NO: 43408 - DNA, 525 bp, Oryza sativa
  unsure (1)..(525): unsure at all n locations
  Clone ID: uC-osroM202036h04b1
attacataagctccggcatcatctccatcatctcatagtcctcttcctcctcagttcatccttgcctgttgcctactccctcctcaatcctgcagaagtttctgaagagatcaattaccaagaaactgagaggaaacacacagattatctgcacacagatcatcaccatacttgcatctgtcgttgagagaagatgatcccgttcacaaagcagagaagcaccaagatgaaacgtgccctgcactaagctatgctgttcggcaggagctcggtgaggccagtgatggaagcacgccgccgcacgccaagattctgcaaggcggactcggagtcggagcagaggaagctacggcgtgtcaggctccccttctggtcgtgcccgccgaatcggccgccgggcacctgacctgacctgacctctcttcctcttnctttgcatcttccacttcctcttcctcttttctcggngtctgaatctttcctgagttggtgaacagcctgaggaagacacnggctacgatcctt

SEQ ID NO: 43409 - DNA, 530 bp, Oryza sativa
  Clone ID: uC-osroM202036h06b1
acatcatacgccatctcctccctccgccgcggcgacgtcgagggaatcggggcggggccggagctagctagttcgccgccggcgagacgcgtgtgccatggtggcagcggcggggacgatggagctggagatcctggggatcaacttcgggtgcgtcctcgcggcgctcgcggacgccaagatcccggagaaggactgcctgctcccgctcgcctccaagctgctcggctacgccatcgtcgccgcctccaccaccgtcaagctccctcagatattaaagattttgaagcacggaagtgtaagaggacttagtgtagcatcctttgagcttgaggttgtcggctacacaattgctctagcatattgtattcataaaggactgccattttctgcgtatggggaactagcttttctgttaatccaagcaattatttttggttgcaatcatttactattactccccaccatgggaaccaagacatggatgaaagctttactatattgcggactggctccaacagtattgggtg

SEQ ID NO: 43410 - DNA, 456 bp, Oryza sativa
  unsure (1)..(456): unsure at all n locations
  Clone ID: uC-osroM202036h07b1
tgttgatccgatccaggaagagctcgccgccgccgctgccatggcgctctccgtggagaagacctcgtcggggagggagtacaaggtgaaggacctctcccaggcggacttcggccgcctcgagatcgagctcgccgaggtcgagatgccggggctcatggcgtgccgcgccgagttcggcccctcccagccgttcaagggcgcccggatctccgggtccctccacatgaccatccagaccgccgtcctcatcgagaccctcaccgcccttggcgccgaggtccgctggtgctcctgcaacatcttctccacgcaggaccacgccgccgtcgtcatcgncagggactccgccgccgtgttcgcctggaagggggagaccctcgaggagtactggtggtgcaccgagcgctgcctcgactggggcgtcggcggcgggcccgacctcatcgtcgacga

SEQ ID NO: 43411 - DNA, 534 bp, Oryza sativa
  unsure (1)..(534): unsure at all n locations
  Clone ID: uC-osroM202036h08b1
gtttaattctaccacctttgaatcgaaattcttgttattcaagcatgtttgcaagaactactccacgcgttcgtattagcgctccagtgaaaaaagccaattttggatctgtgagaaactcacatagtctgaaacaaagactgcaacatttgatcccagaaaaggccgcagaaatcaaaaacattaaagataagcatggagacaaattgcttggaacttgcactgtgtctcaggcatacggtggtatgagaggagttaaagctatgatttatgaaacatcactcttggatgctgacgagggcatccgattcagaggatttaccatccctgaagttcaacaaaagttgccaaaggctccaggaggtgctgaaccccttcctgaaggattgttgtggcttttattgactggagaagttccaactcaagcacaagtttcagaactcagcgctgatcttgctcatcgtaacaaagtncctgagtgggtgttcaaagtgttgaaggacctcccttcagatatgcatccaatgactcaat

SEQ ID NO: 43412 - DNA, 529 bp, Oryza sativa
  unsure (1)..(529): unsure at all n locations
  Clone ID: uC-osroM202036h09b1
ggttgctgcacaccggagacatcggcttcgtcgacgacgacgacgagatcttcatcgtggacaggctcaaggagatcatcaagtacaaggggttccaggtgccaccggccgagctggaggcgctgctcatcactcacccggagatcaaggacgccgccgtcgtctcgatgaaggatgatcttgccggtgaagtgccagtcgccttcattgtccggacagaaggctcagaaatcaccgaggatgagatcaagaaattcgttgcaaaagaggtggtgttctacaagaggatcaacaaggtgttcttcaccgattccatccccaagaacccttccggcaagatcctcaggaaggacttgagagccaggctcgccgccggcatccccgacgccgtcgccgccgccgtcgccgatgcgcccaaaagcagctaaggccaacgccgacgttntctctattttcagtcacacaaccggtgaaaaaaaaatgcagagatatgatgttgctgtccatgaaatggaggccagaatggagc

SEQ ID NO: 43413 - DNA, 497 bp, Oryza sativa
  Clone ID: uC-osroM202036h11b1
atcagctggctgctttggtgtcaatcgctgctgcagttcctgttgcctttgccctgcgccccatcaggagcacaccctcagattttgattggtagctgtgttcgtagcaataacagcctggcagagaatctttgagaagttgcagtctattagttcaacaagggaagttgaacgggatcaagtttagtctggataacaaaatattgatgtcctgctggaatcatcaatcaagtcaacgtcaaagctggttcttcatatacatatatgcttttgcagtaatctcgagcaataagtagttataattgcgagatggctacttactattcaagccctggtagcgaaagagactcgcagaccatgtactcaagagacccaggcagtgcatcctatcctatgtcatcagctctagggaacttgctctatctgaacaatccatcttctggaccttatacggagttcagcggcattctgcagtctcagcagaattgcatggagat

SEQ ID NO: 43414 - DNA, 523 bp, Oryza sativa
  Clone ID: uC-osroM202036h12b1
tttatgctggctgctttggtgtcaatcgctgctgcagttcctgttgcctttgccctgcgccccatcaggagcacaccctcagattttgattggtagctgtgttcgtagcaataacagcctggcagagaatctttgagaagttgcagtctattagttcaacaagggaagttgaacgggatcaagtttagtctggataacaaaatattgatgtcctgctggaatcatcaatcaagtcaacgtcaaagctggttcttcatatacatatatgcttttgcagtaatctcgagcaataagtagttataattgcgagatggctacttactattcaagccctggtagcgaaagagactcgcagaccatgtactcaagagacccaggcagtgcatcctatcctatgtcatcagctctagggaacttgctctatctgaacaatccatcttctggaccttatacggagttcagcggcattctgcagcctcagcagaattgcatggagatgcctggcccttggcatgcgtcagca

SEQ ID NO: 43415 - DNA, 471 bp, Oryza sativa
  unsure (1)..(471): unsure at all n locations
  Clone ID: uC-osroM202037a02b1
cgttatctttactgtccaaacggctgaacaagatgctgcatgccggtcgtgtcaatcaggtgcagcgcaatgcttctggcgccccagcgcggctgctgaaggcatctcatgtgcaaggcgtcaatggacgtgtggtggccaaggttgccaggcgtgcagcactccgtgtttagcgcaagctggctgccagcatcagtgccagcgccacgactgcagtgaagcagcagtcagcagcaccagcagcagcccccaacggcggtggcggtggtggcacccgcgtcatgatcatcggtggagactgctactgtggctgggccaccgggctgtacctgtcagngcgcaactatgaggtgtgcattgtcgacaacctctgcaggcgttagtttgacctgacctttggactgacacggtgacccccatcaccaccatccatgagcgtgtcaaggtctggggcgagcagttacggaagca

SEQ ID NO: 43416 - DNA, 515 bp, Oryza sativa
  unsure (1)..(515): unsure at all n locations
  Clone ID: uC-osroM202037a04b1
ctaccttttcctccggctcttcttcagtatcgaatcctgtgttctcctcgtgcccaccaccaccaccgtagcaatggcgggcaacgggccgatcaacaaggaggacccgctcaactggggcgcggtggtggacgagatggccggcagccacctcgacgaggtgaagcgcatggtggcgcagttccgcgagccgctggtcaagatccagggcgccaccctccgcgtcggccaggtggccggcgtcgcccaggccaaggacgccgtcggcgtcaccgtcgagctcgacgaggaggtccgcccccgcgtcaaggccagcagcgagtggatcctcaactgcatcgcccacggcggcgacatctacggcgtcaccaccggcttcggcggcaccttccaccgtcgcaccaaggacggtcccgccctccacgtcgagctactcaggcatctcaacgccggaatcttcggcactggctccgatggccacacgctgtcgtcggagaccgtgcgggcggncatgc

SEQ ID NO: 43417 - DNA, 441 bp, Oryza sativa
  Clone ID: uC-osroM202037a07b1
ctctacttcacgggcaccaacgacgtctaccacccgggctgcatgctcgcctttttcgtcgcctcctacgcgctcggcgtgctcagctacggtgtcgtcgggccgtcggggctgttggttcccatgatgcttaccggcgccacctacggccgcctcgtcgccatgctgctcggcggccgttcaggactcgaccacggcctggtcgccatcctcggctccgcctccttcctcggcggcacgcttcggatgacggtgtccgtgtgcgtcatcatcctggagcttaccaacagcctgctcctgctaccgctcgtcatgctcgcgctgttcatctacaagaccgtcgtcggctgctgtaactgcagcatatacgacctcatcctcaatctgaagggccttccgcacctagacggtcacgccgagccgtacatgcggcagctcacc

SEQ ID NO: 43418 - DNA, 457 bp, Oryza sativa
  Clone ID: uC-osroM202037a08b1
gcggttttagagcgcgagcggccgacctgatgctgatgccggttgtgtaatcagttgagcgcgagaactaggcccagaagggtgtgaagatcaatgtgcatggggaaatgaaccgtggcgataatgttgccaggcgtgcacaaactctatatttatgtgtgctggatgccacaattattagccagcagctactactgcaggcatggagcgaacctgagaaccagcttaatggcggaaccgatgtggaccgggtggcacacccgtcatgatcatcggtggtgacggctactgtgcctgaggcaccgcgctgaacctgtcagggcgcaactatgaggcgtgcattgtcgacaacctttgcacgcgtaagtttgacctgacccttgggctggacaccatgacccccacaccaccatgcatgagcgtgtcacggtctggggcgagcagttagggaagcaca

SEQ ID NO: 43419 - DNA, 529 bp, Oryza sativa
  Clone ID: uC-osroM202037a09b1
agcttcctttgcaaaacagtgagctagttcctcctgacaaatatgttcctagtgaggatgcaggtcaagcgcacaatctcgttgcttctgatggggctgaaagcctggtgtctcctttgtcaaactccacggaaccttccatcgctgcttatgactcgcctgacaaactttacggtgtaggtccctctgagggaactccttatgtagaagatacattaaactgcgaaattactttgccagaaaaccagcatctgggtgaaaccttaacgtcagatacaatgctaggttcaggtgatgcttcgcttatccaggaaatctctgacactgcagcttcatctgatgcaaaggacaaagatactgagcagaatcctgaacttcatagaaaaaatgggatttcaccatcaagaatgcctgattatacagaatatggacatgctgatcagttgctttcatttggttcaaatgatgtgttcacagaagcaaataagccaggatactgggtggagactttagcatccaatcaaaatga

SEQ ID NO: 43420 - DNA, 520 bp, Oryza sativa
  Clone ID: uC-osroM202037a10b1
cccttcatctctctctctcgcttcctagggtttcgcgccctcggatcccgcggcggcggcgagaagcttccactcgcctcggcggcggcgccggccagaaagatggctggcggttttcgagtactgcatcttgtcaggccctttctggctttcttgccagaagtacagagcgctgataggaaaataccattcagagaaaaagtgatctataccgttatctctctcttcattttcctggtgtgcagtcagctaccactctatggaattcactcaactactggagcagatcctttctactggatgcgtgttattcttgcttcaaaccgtggtactgttatggagctgggtattaccccaattgtgacatctggaatggtaatgcaacttctagtgggatcaaagattattgaagttgacaacagtgtgagagaggaccgtgcacttctgaatggcgcacaaaaattgctgggcatcttgattgctattggggaagctgtggcatatgtgctgtctggaatga

SEQ ID NO: 43421 - DNA, 444 bp, Oryza sativa
  Clone ID: uC-osroM202037a11b1
cgtcttcagttaaaaaaagaagaaggagaagaggaaaaattcagacagagatcgacatggagacgaaggtgaccgtgggcgtcgtcctcctgctgctgtgcctgtgcggcggcgccgcgtgcgccgccggccgtagcggcggcgagttctccattgtcgggtactcggaggaggacctggcgtcgcacgaccggctgatcgagctgttcgagaagtgggtggcaaagtaccggaaggcgtacgcgagcttctaggagaaggtgaggaggttcgaggtgttcaaggacaaccttaaccacatcgacgacattaacaagaaggtcaccagctactggctggggctcaacgagttcggcgaccttacccacgacgagttcaaggcgacctacctgggactcacgccgtcgacgacgaggtcgaacagcacgcactacttgtcggagg

SEQ ID NO: 43422 - DNA, 441 bp, Oryza sativa
  Clone ID: uC-osroM202037b05b1
tcgttttgcatacgcgtacatgcaccggatgaatgctgggtagtaatcctcgcggcctggccgctagttccaccaccgggcgccaccatgtgcgggatcctgggcgtgctcggagccgccgactggtcgcaagcaaagagggctaacgtgctgtcctgctaccggaggctgaagcacaggggacccgactggtgcgggttgcaccagtgcgagcgaaacttccttgctcagcagcgactggccatacgatcaccgctctacggagaccagtcggtgtgcaacgcggaccgcaccatagtagacttggccactggagagatctacaaccacaagaagatcaggaagcagtaactctccaagcacactgttagtacctgtagggacagcgaggacataatgccgatgtatgaggagtacggtcaggacttcggaggcatgctg

SEQ ID NO: 43423 - DNA, 397 bp, Oryza sativa
  Clone ID: uC-osroM202037b10b1
tctgtttgttgagtggaagcagatcaagaagatgctggagaagctgtgggacgacgtggtggccggttctcgaccggagaccgggctctagaagctacctaaggacgctacaacccgcccccttgttatcaacaaagaaggcgacggacaggcgagcggagtggtacacaagcggacacagacgatgccgacgaccccgacgacgccggtgacaccgttgtattggttcccgacgacggctactacgacgacccctcggggcagaaacgtgtggaggaagactttacaccccgggagaaacctcgccaccaagagtccttgtacccaacctaatcagaccgcccccagctcaacttcccccacccactacgaatggctgtgcagggaccagaccagg

SEQ ID NO: 43424 - DNA, 483 bp, Oryza sativa
  Clone ID: uC-osroM202037c02b1
gcgctgcgctgcgtacgtgacagcagaagcgacgcgcgcgcgcgcgagcgacaccagatgttgccgtccaggccgagatccgggtcctggggaggcgggacgcggagttctccggtgtccacgccgaggtctcgccacgagcgcagcaaatccgtcgccaccatcttctcgccgtcgtctcccgagagttacggcggcgtcgtgatggagatggaggagaagaagacgtcgtgcacgctgcaagaagtcgatgggttgcggcagagcgacggtggcgtggacaaggaagtggtgggcggcggcgcggcgtgctccgacgaccgggtgcggctgctggagcgggaggtggcgacggcgaaggcgacggagatgaatatgctggagtcgctgatacagcagacgaaggagatggagcaggcgaagatcgctctcgaggaggctaagctcgaggtcgccacgctgcggcagcagcagggacgcgcc

SEQ ID NO: 43425 - DNA, 533 bp, Oryza sativa
  Clone ID: uC-osroM202037c03b1
cacacacgaaaacacatcccacgcggcggcgtgacacgcgcgaatcgccggagacctcgccggaggtggcgagctcgggtgccggcgatctcctccccgcgggcggcgtccgtccatggctcgtcggtcctcctcctcctcgtcgtcgtcgggggcgtggcggtacctcaacccggcgtattacctcaagcggccgaagcgcctcgccctcctcttcttcgtcttcgtcgccgccaccttcgccttctgggatcgacagtcgctcgtccgcgagtacgagtcagaaatttctcgattggatgataaagtaaatcagttgcgtgaccagttaagaaaggctggagttcatctggatgaaaatccaacaggtgacaaagtatccagagaaaagcttgtagaaattgatcctattaataatgaaaggagagaaaaggttaaggaggctatggcccatgcttggaattcctatgtgaagtatgcctggggaatggatgaacttcagccacaatcaaagaatggtgtcaatagctttg

SEQ ID NO: 43426 - DNA, 525 bp, Oryza sativa
  Clone ID: uC-osroM202037c04b1
tcgctcccaccgtgttcttcctcctcccagatctaagatccgtggaccgaccgagctcgagctccaccacctcgtctccaatggcggtcaaggtctacgtcgtgtattactctatgtatggtcatgtcgccaaactagctgaggagatcaagaaaggtgcttcatctgtcgaaggcgtggaagttaaaatatggcaggtccctgaaaccctctcagaggaggtgctgggcaagatgggcgcgccgccgaggagcgacgcgccggtgatcgcgccgcaggagctcgcggaggccgacggcgtcctgttcgggttcccgacgaggttcggcatgatggcggcgcagatgaaggcgttcttcgacgccaccggcggcctgtggcgcgagcagagcctcgccggcaagcccgcgggcgtcttcttcagcaccggcacccagggcggcggccaggagacgacgccgctcacggcggtgacgcagctggcgcaccacggcatggtgttcgttccggtcggctacacgttcg

SEQ ID NO: 43427 - DNA, 297 bp, Oryza sativa
  Clone ID: uC-osroM202037c06b1
ggggaagattaaattgccgtggcgaccggtaatggccactcatccgagatcaagaacgtccacagcgacattgacagcaccaacaagacgttgctaaagagcgacgctctgtacaagtatgtcctggacacgacggtgctgtcacgggagccggagttcaatgccgaactgtgcctcattacggacaagcaccagtgggggttcatgcagtcgtcggtggatgaggcgcaaatgctggggatgcttctcaaaaaagcccgtgcgcaaaggacaattcaggcgggtgtcttaacccgc

SEQ ID NO: 43428 - DNA, 512 bp, Oryza sativa
  Clone ID: uC-osroM202037c09b1
cggacgcgtgggttcttgcccaccattcctctcttccttccttctcatgatttctgcgccttctgtggggatcgccttcgcgcccaagccgccaccggcagcggcggttgggtcgtaccgggcaaggaaggtccggtgcgcggtggccgtggctcctgcgccggcgccggcggggacgctgtacgacgtgctggggctgcgtgccggcgccacggtgcgggagatcaaggcggcgtaccggcgcctcgcgcgggagcggcaccccgacgtggccgccagcgccggggccgacgacttcgtcaggctccacgacgcctacgccacgctctccgaccccgacagccgtgcgcgctacgaccgcgacgtcgtcgccgtcgccttcatggcgcgcggcgcgcaccaccggacgatggcggatcccgccggcgagccgagctggtacggacgtcgtccacgccgcacctgggagaccgaccagtgctggtagcgcacacacgcgatttctgtctctt

SEQ ID NO: 43429 - DNA, 523 bp, Oryza sativa
  Clone ID: uC-osroM202037c10b1
cataccccgagacccccccgcctccaccaccacccgccgctcgccgctcgcccaccatggccatggcgacggcgctccgcaagctctcctccgacgccctccgccgccagccgctctcccgcatcaccccgctctactacatggcgtccctgccggcgacggaggagagatccggagtcacctggccgaagcagctgaacgcgccgctggaggaggtggatcccgagatcgccgacatcatcgagcacgagaaggcccgccaatggaagggtctggagctcatcccgtcggagaacttcacctcggtgtcagtgatgcaggcggtgggatccgtcatgaccaacaagtacagcgaggggtaccccggcgcgagatactacggtggaaacgaatacattgatatggccgagtcattgtgccagaaaccgtgcttggaggccttccgcttggacccagcgaaatggggagtgaatgtgcaacctctatcagggtcacctgccaacttccatgtttacactgccct

SEQ ID NO: 43430 - DNA, 393 bp, Oryza sativa
  Clone ID: uC-osroM202037c11b1
tctaaaacacccacccggtttaccagagatccgagcccgccactagtaaacctgctgcgccgatggtgcccagagcagctacggcggacaaggatgctgtggcgccacccaccggactcggacttggcatatgtggaggtgttggagccgggggacctcactacaggggcgaccgtaagcgctccaggcggcgatacgcacaggagatccgtgaccctgccaagaagagccgggtgtggctcgacacctacgacacggcagaggaggcgcgccgcgcctacggcgccggcgctcgggagttacggggtgccaaggcgaacacaaactgtacgttggcatgacagtcgatggtcggctgtggcggacgccccagcagcaatagcgccgtagaca

SEQ ID NO: 43431 - DNA, 453 bp, Oryza sativa
  Clone ID: uC-osroM202037c12b1
tcgacctccagcagctcaagcagcaacagctcaaacggaggaagatctcatcgccatgacgaccggcaatggcgacgcaccggtgatcaagaacgcccacagcgacatcgacagcaccaacaagacgctgctcaagagcgacgccctgtacaagtatgtcctggacacgacggtgctgccacgggagccggagtccatgcgcgatctgcgcctcatcacggacaagcaccagtgggggttcatgcagtcgtcggcggatgaggcgcagctgctggggatgctgctgaagatggccggagcgaagaggacaatcgaggtgggtgtcttcaccggctactcgctgctggcgacggcgctggcgctgccggaggacgggaaggtggtggcgatcgacctcgacagggagagctacgagatcgggcggccgttcttggagaaggccgggtggcgcac

SEQ ID NO: 43432 - DNA, 454 bp, Oryza sativa
  Clone ID: uC-osroM202037d01b1
cccatttctcacttactccggcgatcaccgtggttgagcgtcggcggcggaggaggaggcgatgattaccatggatctgatgggtgggtacgggcgggtggacgagcaggtggccatccaggaggcggcggcggcggggctaagggggatggagcatcttattctgcagctgtcccagactgggacgagcgagaggtcgccggcgccggcgcaggagcagcagcaacaggtggactgcagggagatcacggacatgacggtgtccaagttcaagaaggtgatctccatgctgaaccgcaccggccacgcgcggttccggcggggcccggtggtggcgcagtcgtcgggcccggcggcgtccgagccggcgccggtgaggtcgttcccgtcggcggtgtcgaggcccatgacgctcgacttcaccaaggcggcgtccgggtacggcaaggacgcc

SEQ ID NO: 43433 - DNA, 432 bp, Oryza sativa
  Clone ID: uC-osroM202037d02b1
tcactgtcacaggtgcttgcttagcttagcttagctttgctgctgctccttctcattcataagccagcagctagctagcaagcagcacacacatatatcacaggccatctctctatccctaattaagctatatactccatatagctagctaaacacaggaggagtggaggaaggagaggctagctgatctagctatctgcagtgattagttaaaatgatggcttctgataggttggatgcagaaaggatcatagagtacttcaagggcaagagcatcctcatcactggagcaactggctttcttggcaagattcttgtggagaagatactgagggtgcagcctgatgtcaagaagatctacctgctcgttcgcgccatcgaccaagcatctgcaaaccaacgcgtccaatctgaggtgacggaaacggagct

SEQ ID NO: 43434 - DNA, 531 bp, Oryza sativa
  Clone ID: uC-osroM202037d07b1
gtggcgttgaggctagctagctagctagggtttcgtgctccccatcgcctcgcgcgcgcagccggatccgatcgggcgtcctcgtcggcgtcggcggcggtgcccctgatatcagtgttgtgattccgttgcaatggcatctggaactgatgagaaagccaagatggagggtttgacatcagctgcagcctttgttgagggtgggattcaggatgcatgtgatgatgcatgtagtatctgccttgaggcgttctgtgagagtgacccttccacattgactggttgcaaacacgagttccacctccaatgcattcttgaatggtgtcagagaagttctcagtgtcctatgtgttggcagcctatcagtttgaaggatcctaccagtcaagagctgctcgaggcagtggagcgtgaaaggaatgtaaggaccaatcaaactcgaaatacaactatatttcatcatcctgctcttggagattttgaggttcagcatcacctagcagcagccggtgcaatgggaaggtcacacca

SEQ ID NO: 43435 - DNA, 523 bp, Oryza sativa
  Clone ID: uC-osroM202037d10b1
atatatgactgagtcaattcctgagaattccacatcacttgccattctcttagcagtcattgtattccatattggttttagagttatggaataacagggttttatgtatcttagaaaattcagttttggtgagacctgggatcaagcaaataccatttgttatttttgtgtaatggtttcttaggtaccattttcagtgtaacagtggtgctccaataggtgccttttttcctcctttccacatctttttctcactatgtttcactgctgcttttattcagtgttcttgttcatagtggaggagtacatggcggtcactactatgccttcattcgaccaacgctatcagatcaatggttggtttttctttgactttttttttgtctctagtactacaacaatacaaaattattcaactatttgccatttaccagataatattattaccctgttcctatgcatggccacttgatgacagctgaatagatgtgttctccgagacaactccctggcactctattcg

SEQ ID NO: 43436 - DNA, 346 bp, Oryza sativa
  Clone ID: uC-osroM202037d12b1
gggtatttgcgctggcgatcgagggggtgctgggtgcgtgcgggctggcggcgtcggacgcgctgcaccacggattttcccatgatctacgaaagccgcggcttggaggactctatcgatggccgtgccgaggaggtgcttggggggaacatgaaaggttcgtaatgtgtaggacgattggataagaagagacatccggttgctgatactatatcagaggcggtgctgggcaggatgggagcgcaaggcactagggaccagcgcgagatggtgcactatgagctagaggaggccgaatgcatgctgtacgtgttcccgacaaggatcggtatgatggacgaaccaa

SEQ ID NO: 43437 - DNA, 437 bp, Oryza sativa
  Clone ID: uC-osroM202037e01b1
cgaacaagcatttcctcgaacacttcgccctccaccaccatggccgccgccgcctccaccctcgcctccctctccgccaccgcggccgcggccgccggcaagcgcctcctcctctcctccccctcccgctccctctccctctccctcgcctcccgcggccgcatcgccgtcatgccccacctccgcgctggcatcctctccgccgcaccgaggagggcggtgtcggcctcggccccggccgcggccaccatcgcggtcggggacaagctccccgacgcgacgctctcctacttcgactcgcccgacggggagctgaagacggtgaccgtgcgcgacctcaccgccgggaagaaggtggtcctcttcgcggtccccggcgcgttcaccccgacctgcacgcaggagcacgtcccggggttcgtcggcaaggtcgggga

SEQ ID NO: 43438 - DNA, 449 bp, Oryza sativa
  Clone ID: uC-osroM202037e02b1
gggtgtgagagctagctaactcaggctcagccaactgatcgcgagctgtgacgaggtgatcaccatggcgtcctcgtcgtcgcttcttgttcgtgggagagcgttcgcgctggttgtggctgtagctctggtggctgctcctcgccggattaatggcggcgccgccgggccggcggcgaggacgaacgaccccaactggcacgtcttcagcgtcagctcgctgctgccgagctcggcctgcactgcatcgaaagcggcgtccaactcgtcggctctcggcgtcgtgcaccggcacgggccgtgctcgccggtgcaggctcgtcctcgcggcggcggcggcgctgtcacccacgccgagatcctggaacgcgaccaggccagggtcgactccatccaccgtaaggtcgccggcgccggggcgcgccgttggtggtcgacccggcacgcgc

SEQ ID NO: 43439 - DNA, 504 bp, Oryza sativa
  Clone ID: uC-osroM202037e03b1
cgtgctagcaaatatcaaaaagcagctccagcttcttctgatcgatcgatcgagctgagctataggcagtagctgctaattaagctaattaattgctaagcagtagtagagctagctaattaattaagatggccggcaagaaggtgcaggtttgtgcgctgttccttgccctcaatgtgctcttcaccatgcagatgggtgcagtagtgcaggcatgcgagccctactgccccacaccgacgccgccggtgacgccgcctccgtcgccgccgtcgggtggagggaataagtgcccgatcgacgcgctgaagctgagcgtgtgcgccaacgtgctcaacctgctgaagctgaagatcggcgtgccggagagcgagcagtgctgcccgttgctgggtggcctcgtcgacctcgacgccgccgtctgcctctgcaccgccatcaaggccaacatcctcggcatcaatctcaacatccccgtcgatctctctctccttctcaactact

SEQ ID NO: 43440 - DNA, 473 bp, Oryza sativa
  Clone ID: uC-osroM202037e06b1
ctttcatctccaattcggtccgaatttttccaaagtccaattgctcatcgcgcttcgaattcgttgccgagatccatccaatctttgagttaagacatgccgtcagagttcgtcgccgccaggaagaagccgccgccggagttgttgttcgccgccggtcggaagaagcagcagccgccgccgcctggcatggcgttcgtgccgtcggagttcgccgccgccggcgttggcaggaagaggcagcctgcgccgccggtggagatacgccgggtgtgggcgcacaacgtggaggaggaattccggatcatccgcaacgcgatcgatcacttcccgtacgtgtccatggacacggagtttcccggcgtgatccaccgcccgaccaagcaccccgccctgctcaccgccggcgaccggtacgacctcctccgtcgcaacgtggacgcgctccacctcatccaggtgggcatcaccct

SEQ ID NO: 43441 - DNA, 344 bp, Oryza sativa
  Clone ID: uC-osroM202037e08b1
tttgatttagcagatatcaaacagcagctccagctgcttctgatcgatcgatcgagctgaactataagcaggagctgctaattaagctaattaattgctaaacagtagtagagctaggtaattaattaagatggccggcaagaaggtgcaggtttgggcgctgttccttgccctcaatgtgctcttcaccatgcagatgggtgcagaagtgcaggcatgcgagccctactggcccacaccgacgccgtcggtgacgccgtcttcgacgtcgtcggtgggtggagggaataagtgcccgatcgacgcgcttaagctgagcgtgtgccccaacgtgcttaacctgc

SEQ ID NO: 43442 - DNA, 480 bp, Oryza sativa
  Clone ID: uC-osroM202037e09b1
cgaagccttccttcgcccttgtcgtccaaccctcctctcctcccctcctcgtcgcggggctagggttacgccccctcctcctcctcctcctcctcctcctcgagtgggggcatggccgggagcgaggcggcggcggcgcaggaggcggagatggacccggacttctcgggcgggggcggtgggggccccagcttcgagttcgccttcaactcggtcaacttctacgaccgggtgctccggatcgaggtcgtcgtgggggacgacgactacgacgacgaccacgcgcccggctacagccgggacggcggggccggctcgctctcggattgggcgcgccaccgcaagcgccgtcgcgaggagctcctcaaggagaaagagtctgaagcagtcatgccagaccagataaattgcaaagtagaaccagaagaatgtgatgcatatgaagaaaatcaagaagaacctgttgcaatgatggacgac

SEQ ID NO: 43443 - DNA, 480 bp, Oryza sativa
  Clone ID: uC-osroM202037e10b1
atacaggtaacatggaggtcctgttgagatatgggactaaggagcaacaaaagcagtggcttgttcctttgttggaagggaaaattcgttctggatttgcaatgacagaaccacaagttgcatcttcagatgcaacaaacatcgagtgttcaatatcaaggcaaggagatttctatgtgataaatggaacgaaatggtggaccagtggggctatggatccaaggtgccaaattcttgtattaatggggaagacagatttttctgcacctaaacataaacagcaatcgatgattttagttgatgtcaaaacacctggagtgcagataaggagaccgttgttagtatttggtttcgatgatgcacctcatgggcatgcagagattacttttgagaatgtgcgcgttccagccacaaatattctccttggggaaggccggggttttgagattgctcaaggaagactaggtcctggaagattac

SEQ ID NO: 43444 - DNA, 529 bp, Oryza sativa
  Clone ID: uC-osroM202037f01b1
ggagaagagaaggtggtttccggtgaaaattgtggcctctttttcggaagtttttttgtccttcccctctcgttctctttttattccaccgctttgtcgttctcgcaatctcgctgtccaccttccccacccccccccccccatttactcgatcatcacaacgtgccaatcaattaatcgatcgatcagttttgtgcgtacgtgagcgtgtggagagggagagaaatggacatggaaatcgtggtttttctgaggtaatgtgctggaggaggaagaagaagaagaagaagaagcagctattgttgctgctgctgctttctgggattccgaggaggcgatatgcttcgcaacagatcgaggagatcagtcggtgccaagcaaggaggcgttaccgccatggcgcagcctgagccgccgccgccgtcatcgcaatcttcgtcgtagtctttctcctcttctcccgtggttcccttccccgaggccgttcatggcgctcccgcacccgacgtaggctgggttcttggacggc

SEQ ID NO: 43445 - DNA, 469 bp, Oryza sativa
  unsure (1)..(469): unsure at all n locations
  Clone ID: uC-osroM202037f06b1
gaaaaactactagcatgagtggagagctgaagagagactacgagattggcgaggagatcgggcgcggccgcttcggcgtggtccaccgctgcacgtcgcgcgccaccggcgaggccttcgccgtcaagtccgtcgaccgctcgcagctggccgacgacctcgaccgggagctcgcggagctcgagcccaagctggcccagctggccgccgcgggcaacccgggcgtcgtccaggtgcacgccgtgtacgaggacgacgcgtggacgcacatggtcatggacctctgctccggccccgacctgctcgactggatccgcctccgccgcggcgcgcccgtcccggagcccgtcgccgccgccgtcgtcgcgcagctcgcggaggcgctcgcgcactgccaccgtcgtggggtcgcccaccgcgacgttaagcccgacaacatnnctctcgacgtcgtcgacgacgggatcga

SEQ ID NO: 43446 - DNA, 295 bp, Oryza sativa
  unsure (1)..(295): unsure at all n locations
  Clone ID: uC-osroM202037f07b1
aagttattcacacacagcgcgctcacagtgatcggagatggcgaaggacattgaggcggcggtggctgttgttggcccggagtacatttctaacgacttctntgaccagctttcggacgccgctgatcgacatttactgagatcatccacaacgtccctgtcacctaacggtaaccatcagtttttgtgcgtacctctgctttttctatacataacgaaatccacatggaaatcgtacaatttctaatcatacccgctggaggacgcagaagacgaagaagaagaagcttctatt

SEQ ID NO: 43447 - DNA, 468 bp, Oryza sativa
  Clone ID: uC-osroM202037f08b1
ctttatgttttgacctgggaggatgtggtgtcgtggggtgatatattcgttaccactactggggatacggatataataatggaggaccacatgaggaatattacggatacacgacatacggttgtaagattgagcagtctgatactgatagtgatactgctacggatatggacgtaccctggtgtcaagcgcataactatcaagcctgagaccgaccgctgggtcttccctgagaccaacactggcatcattgtccttgctgagggtcgtctcatgaaccttgggtgcgctactggccaccccagttttgtcatgttctgctcattcactaaccaggtcattgctcagcttgagctgtggaaggagaagagcactggtaagtacgagaagaaggtgtacgttctttccaagcaccttgacgagaaggtggtcgtcctccacttgggcaagcttggtgccaggctgacc

SEQ ID NO: 43448 - DNA, 301 bp, Oryza sativa
  Clone ID: uC-osroM202037f09b1
ctgttaatgctaatgtctgtgacgagatggaagagctggggattgagaaggacactgtcacctacaactctttgattaatgggtatggaaagcagggacgcttggatatcgcttctatccttgttcaagatatgaggaaacggggggtagcttctagcggatcaactgattcaactttgatagatatatattcaaaggcagggatgcatggagatgcattcaatgtctacttggattctaaggagttaggcctaaagtcagatgttgatctattcagctctttcattgatacattggccaa

SEQ ID NO: 43449 - DNA, 477 bp, Oryza sativa
  Clone ID: uC-osroM202037f11b1
gttgtcttttgagctttaatccccgcccccagcctctggcccgtggactcgcagcagcacacggcatccgaagccgagggcggagcagggatcgactagcggtgaggaggcgggcgagcggctggccgccatggaccgtggtctgagcacgttactgggagcttgcgtagctcgagcccaagctgttgcaggcttgccagcatgcgcatagtttggcgtatttaagggtatactccgtcggtcgaggacgacttcgtgtacgcacatggtttatggacactttgctttcggctcccgaacctgtttgactggaatccgctctacgtcgtgagcgcgcttcgttctggagccccgtcgtcggacgtcgtcgttgcgcagcatcgtggaggcgctcgcgcactgacaccgtcgcggggttgtccaccgcgacgtcaagcccgacaacattcttcttgacgttgtcgacgacgggatcga

SEQ ID NO: 43450 - DNA, 450 bp, Oryza sativa
  Clone ID: uC-osroM202037g01b1
ccgtctccgcctccaaaaccctaaccctagctcgccgccttcgcgcgagctctcctccatggagaaccccaggccacaggctcctgcggggacccctcccatggctcccctccccgtgcccccgcccatcgcccccatccctgccccgcctccgcgagccccagcacccgccccggccgccgccgccgccgtcgcctcgacctccgcggcgggaggaggcggcgggggcggcggtgaggctgactacgaggtctccgatgaccaccgcgccgcgcgggagcgccacgagcgcgcggtgcatgagctgctccagcgccgtcgcgccttcgccatggccgtgcccaccaacgactccgccgtgcgggcgcgcctccgccgcctcggcgagcccgtcacgctcttcggcgagcgcgagatggagcgccgggaccgtctccgcgctctcatggt

SEQ ID NO: 43451 - DNA, 457 bp, Oryza sativa
  Clone ID: uC-osroM202037g02b1
ggttacgatcgtgtccgtcaaggcgcgccagatcttcgacagcaggggcaaccccaccgtcgaggtcgatgtgtgctgctcagatggaacctttgcaagggctgcagttcccagtggtgcatcaactggtgtctatgaagctctcgaattgagggacggtggatctgattacttgggaaagggtgtttacaaggctgtcgacaatgtgaactcggttattgccccagctctgattggcaaggaccctacgtcacaggctgagcttgataacttcatggttcagcagcttgatggaaccaaaaatgagtgggggtggtgcaagcagaagcttggtgctaatgcaatcctggctgtgtcactggccatttgcaaagctggagctatcatcaagaagattcctctgtaccagcacattgccaaccttgctggaaacaagcaactggttttgcctgtacct

SEQ ID NO: 43452 - DNA, 526 bp, Oryza sativa
  Clone ID: uC-osroM202037g04b1
aggaaatccatccatggcgatctccaagctccagctcgccctcctcgccgccgcaatggcggcggcggcgatctcccccaccgcctccggcgcctacaccggctgcgcgacgccgaggaaggtgacgatccagaacctctccggccgcgacctgcccctctccgagacgccgctggcgaacagcggcgcgctgttcggcgccggctacgtgctccgccacggcacgcacgccgagttcacgacgtgcctgtggacggggcgcgtggcggcgccgggggcggcggtggtggagttccacgtcggccccgacggcggcgcgtggtaccaggtggacaaccgccaggccgggtcgccggtgaaggtcaccgtgacgccgcacggccggccgctccagggccactgccccgccgccgggtgccgcggcggcggccagtgcttcgtcgacgccgtccccggcggcaactgccacgccgtcgacgagctcaagatcatctactacagcccgtgattttggttttggtttggg

SEQ ID NO: 43453 - DNA, 412 bp, Oryza sativa
  Clone ID: uC-osroM202037g05b1
tccgtctccgcctccaaaaccctaaccctagctcgccgccttcgcgcgagctctcctccatggagaaccccaggccacaggctcctgcggggacccctcccatggctcccctccccgtgcccccgcccatcgcccccatccctgccccgcctccgcgagccccagcacccgccccggccgccgccgccgccgtcgcctcgacctccgcggcgggaggaggcggcgggggcggcggtgaggctgactacgaggtctccgatgaccaccgcgccgcgcgggagcgccacgagcgcgcggtgcaggagctgctccagcgccgacgcgccttagtcatggccgtgcccaccaacgactccgccgtgcgggcgcgcctccgccgactcggcgagccccgcacgctcttttgcgagcg

SEQ ID NO: 43454 - DNA, 524 bp, Oryza sativa
  Clone ID: uC-osroM202037g06b1
catggatgctggtctggagaaagctgccagaagtgcttcccaatcaaaggtggaaaatggctcaccttcagaaatcattttagatgattttgaagacttgagccctctatcagaaaatgatgactccactgttagtatcactgtagtcggagcatctggtgaccttgccaagaagaagatatttcctgcactttttgctctatactatgaagattgtcttccaaagcatttcactatcttcggatatgcacgcagcaagatgacagatgctgaattgagaaacatggtcagcaaaacactgacatgcagaatagataaaagggaaaactgtaatgagaagatggaagagtttttaaagagatgcttctatcattcaggccaatatgattcagaggagcatttcatggaccttgacaagaagctgaaacaacatgagggttccagagtttctaaccgtcttttctacttgtcaataccaccaaatatattccttggatgttgtaaatgtgcaagcaaatcagcat

SEQ ID NO: 43455 - DNA, 501 bp, Oryza sativa
  Clone ID: uC-osroM202037g07b1
gtgtttttgaacatatactagattccttgacagcttggtatttatcatgggtgggctactcgatgctatcctactgcttctggtctcctgcgcgggagacagccatgccgcgttgccagcggagatgtactggaagatcgtgcttccgaccgctgccgactccgtaccgttggccaccgaaaagctcccggagatcctctcccagctctccgtccccgccggctccccggccgccgacgccatgagtgcgaggccgtgccgctcgccggcgaggcgaagcaatgcgcgacggcgctcgagtccatggtggagttcgccgcgtccagccttggcacccgcgacgtgcacgcagtgttcacggaggtcgacagggcagggccggcgccgaggcacgcgtacagggtggaggccgtgaggaccgtgccggtgtaccgcggtgacatggtggtgtgccacggtatggcctacgcgtacgccgtgttcgggtgccacacgaccacg

SEQ ID NO: 43456 - DNA, 542 bp, Oryza sativa
  Clone ID: uC-osroM202037g08b1
gtcgtactctccccctgcgaagaaagaaaaagctttttctttttcctcccggcaaaccctagatcggcgccgccgtcggcggcaccggggtactctccccggccggtcagcccccgtcgattcggttctctggaaggctggcacaccggatccgcgacgtcgggggatggtgttctgctctcgccgtgggggagagtgtccggcgccggccggcgcgctggagaagtggaaattgatctcctcggcggccggcggaggcggtggcttttattcgtcggatgtatacggtgacggttattcgattcttgagtgtgggtggtgttttttttccttgtatgtataaacgatttattttctcaagatagagaggaaaagctgctgatgctgttcttacgatggatagcgaccgtgcgctagttggagcggtcaaaggagccagctatttcgcccggatggtcttgtcgcatatgacattcgcctgcgatcggtgatgcttatgaggtaacttttttttttttgtcggagtttttgtttgaggggac

SEQ ID NO: 43457 - DNA, 522 bp, Oryza sativa
  Clone ID: uC-osroM202037g10b1
gatttcactgaagcacgtccatgtagcaaaaaaccttgctgtattcctgggttgagagtagaaactggcaatcttgctattagttcatcgctggcttctgcaaagtcatttcgctctctatcatacaattcttctgctccttcattatattcaagccttttttcttgggagacagatgcatctttatcttgttcagatggcatatcaaggccaatcgatactatattcaaatttcataaagcaattcgcaaggacttagagtacctagatgttgaatctggaaagcttattgatggtgatgagtcttgtcttcgccagttcattggaagattccgtttattgtggggtctttacagggcacacagtaatgctgaggatgaaattgtttttcctgctttagaatcaagagagacattgcacaatgtcagtcactcgtacactcttgaccacaagcaagaagaacaattatttggagatatatctgatgccctcgctgagctatcgcagctacatgagaggttg

SEQ ID NO: 43458 - DNA, 490 bp, Oryza sativa
  Clone ID: uC-osroM202037g12b1
gtcacagttcaaacaagtcaagagcgaatagttcttgctgatctgttgtttgattactttagttctcgagaggctttagctgaatccatcgatcgatcatggaggatgagaggaacacggagagccaccagggtggcgaggctgcagagcaggtggaggtgaaggacaggggcctcttcgacaacctccttggcaggaagaaggacgatcagccggaggagaagaagcatgaggaggagcttgtcaccggcatggagaaggtctccgtggaagagccaaagaaggaggagcaccacgccgagggcgagaagaaggagagcctcctctccaagctgcaccgatccagctccagctccagctcgtcgagtgatgaggaagaggaggtgatcgatgacaacggcgaggtggtcaagaggaagaagaagaaggggctcaaggagaagatcaaggagaagctgcctcgccacaaggaccatgccggtgagcatgc

SEQ ID NO: 43459 - DNA, 448 bp, Oryza sativa
  Clone ID: uC-osroM202037h01b1
agtggagattgttgagtatatcaggtctatatattggcagttctggttggagatagacactcacactgagccaagatggggagtttgcacaagttcagtgttattctcctcatgttatgttttgctacgttggggagcgctcagtatgtcaagtataaggatccgaagcagcccgtctctgttcgtgtcaaggatctgctcggccggatgactctcgctgagaagattggccagatgacccaaatcgagagggagaatgccacggcggagcagattgccaagtacttcataggtagtgtactgagtggtggaggcagtgtgcctgctcctcaggcatcagcttaggcttgggcttcaatggtgaatgaaatgcaaaagggtgccctttcgacccgactaggtattccgatgatctacggtatcgatgccgtgcatgggcacaataacg

SEQ ID NO: 43460 - DNA, 396 bp, Oryza sativa
  Clone ID: uC-osroM202037h02b1
acgattttgaggagggcaccagcgtttaggtaatgagcagttgttaattatcttcactagccttaattaccctgacgcaaagcactctctaatactcctcggcgctcgcataatcttgtatccctcatctcagattatgatcacctcgccgtgttagaaaaaagggagtaagttcgttttatcgtcggatttggtgagagttcgccggagtagaagaagatgacggtgacgccgaagatcacggtgagcgactggaggctggcggtgcgggggcggacggtgctgaccggcgtgccggagaacgtgacggcggcgcacgcgtccggcgccgggctcgtcgacggcgccttcgttggcgccgacgccggtgaggccaagagccaccacgttttcacc

SEQ ID NO: 43461 - DNA, 415 bp, Oryza sativa
  Clone ID: uC-osroM202037h03b1
gtgtatacctgcgctccaccgggatcggctctctcgctcgtgccgtcgggcgtcggggatcctcccgccggagcacgctcgcctgacctggctgcctccgccgcttcgaatcgaagcccgcagctcccccttcctctcttcctctccagacagtcccctactcccctctgctgcactggacttggggtggggtggagcgggagatccatccaagatagctcggagtgagggatttccccttttttctgaaggttgtagaagcttggaggatgccgaggcgggaggggggtcgctctcgctacgccgactacctcgtcctcttcgattcctgccttttagctgttgcggcggcatcacaccaagaaatttatgaagctgctggatccagaacttttcttatgtcacatgaacacac

SEQ ID NO: 43462 - DNA, 434 bp, Oryza sativa
  Clone ID: uC-osroM202037h05b1
tgggtcggcattctttttctgcatcatcatcgtcgtcttcgtcttcttcttgttcagtagtgcagctgggtcatcatcagcgcccacagggtgaggaccctctcatcggcatcaaagcagcagcagcaggaggaggaggaataatgagaaagggcccgtggacggagcaggaggacgtgcagttggtttggttcgtgcggctgctgggcgaacggcggtgggatttcttagcaaaggtgtcaggtttgcgcggcggcgggtgatgagcatatgcgtgcgtgcatctaatctatcgattaattgttgatgatgtcgatcagatggatggatgcatgcatatgccgtacatagtagatttgatgatagtaactgacataaatataatgtatgcgtgcgatcaacgctggttgttggatcgtacgacgtgtgtatgg

SEQ ID NO: 43463 - DNA, 486 bp, Oryza sativa
  Clone ID: uC-osroM202037h06b1
cccgtctcctccgcttcgctactctcctcgtcgtctccggctccggctccggtttccggcgagcggcggcgcgatcccgggcggcgaaggagggggaagccatgagggagatcctccacatccagggcgggcagtgcgggaaccagatcggggccaagttctgggaggtgatctgcgacgagcatggcgtggacgcgacggggcggtacgcgggggactccgacctgcagctggagcggatcaacgtctactacaacgaggcgagcggcgggaggtacgtgccccgcgccgtgctcatggacctcgagcccgggaccatggactccgtgcgctccggccccttcggccagatcttccgccccgacaacttcgtcttcgggcagtccggcgccggaaacaactgggccaaggggcactacaccgagggcgccgagctcatcgactccgtcctcgacgtcgtccgcaaggaggccgagaactgcgact

SEQ ID NO: 43464 - DNA, 281 bp, Oryza sativa
  Clone ID: uC-osroM202037h07b1
cgcgtatttttttgaggcgggcgccagcgtttaggtaatgagcgctttggttggagatagactcacctaactgagcctgacggggagactgcacaagtactactgggacgctcgcacaagttatgtttcgctatctcggagtgtgatcaccttgtcaagtataaggaaccggagtaagctctctttattcgtggcaagggtgagagcttgccggtgactatcgctgagacgatggcccacgtgatcacagtcagcagactggaggctcccggtgcagcaga

SEQ ID NO: 43465 - DNA, 354 bp, Oryza sativa
  Clone ID: uC-osroM202037h09b1
gcggtttatgttcacgagagcacgacgaggacccgatctcgtgtttctttcttttggtttcaagtatcatcgccacattgcgcgctcgattttccttattttttttgctcgtttcgattcgagtctaccctttattcatccctcttctcgcgttggacgctcctccacccgatctctgctctcgaagcttctggaagcttcggggggaggaatcccgggccgggctcgcccgccatggcgctgcggtggtgtagctccttgtggctctcgtcggtgtcgcgctcgtcggggggagtccgcggtggctaatcgaatgtgtcgtcggagatcgctcctgtgagcggcggggagggg

SEQ ID NO: 43466 - DNA, 507 bp, Oryza sativa
  Clone ID: uC-osroM202037h10b1
agctaacccaacccaaaccaaacacgagccggacgagacggagcgctccctccctctctgtcgcccgcgacgccgcgaagccgcgggcgccaccgccgccgccgccgccgccgccggagatggacggctccggcagctgggacgccatagactggaaccaaatcaaggagccgaggccgccgcggagttcgtcccggggcatggaggacttcctcctcgaggatgaggaggtttacgcccagggtcatggtgttgttctactaaacacagatgaggctggcattctttcagtgacaaatttccgacttctctttgtgagccaagccacaaaaggcgttatagagttgggtaccatcccactaactgcaattgagaagataaatgatgacgtaaagcttcaacccttgccccgccagcatgataagaagcagccccgtgaacttcttcaagtcatcggtaaagacatgagggtcattgtgttcgattttcttcctaaaaccaagcaga

SEQ ID NO: 43467 - DNA, 540 bp, Oryza sativa
  Clone ID: uC-osroM202037h12b1
tcgtaagaggctcaccttccttcacccagagattgaggagttgctctacagcgaagttgacaacaacgagcacaagtttatgctgaaggacaggaacaagccaatcatcttctccatggctcgtcttgaccgtgtcaagaacttgactggtctggttgagctgtatggtcgcaaccctcgcctgcaagagctggttaaccttgtggttgtctgtggtgaccatggcaacccatctaaggacaaggaggagcaggctgagttcaagaagatgtttgaccttattgagcaatacaacttgaatggccacatccgctggatctccgcgcagatgaaccgtgtccgcaacggtgagctctaccgttacatctgcgacaccaagggtgcttttgtgcagcccgctttctacgaggcattcggtctcactgttgttgagtccatgacctgtggtctcccgacattcgcaaccgcctatggtggtccagctgagatcatcgtgaacggagtgtctggcttcacattgacccatacagggtgacaagg

SEQ ID NO: 43468 - DNA, 456 bp, Oryza sativa
  Clone ID: uC-osroM202038a01b1
ctgtgtcctgtagagaacagtcagttcagtcggcgaagcagatgaaaaagttagatcagaggagagctcagagctcaaagagttgggaagccatggcgggagggcagctcaacgtgctgagcacgctcgaccaggcgaagacgcaatggtaccacttcatggcgatcgtcatcgccggcatgggcttcttcaccgacgcctacgacctcttctgcatttgcctcgtcaccaagctgctcggccgcatctactacaccgacgattccaaggacacccccggcgcgctcccgcccaacgtgtcggccgccgtcaccggcgtcgcgctctgcggcacgctcgccggccagcttttcttcggatggctcggcgacaagctcggacgcaagagcgtgtatggtttcacgctgattctgatggtcgtgtgctcggtcgcgtccgggctctcgttcgggagct

SEQ ID NO: 43469 - DNA, 486 bp, Oryza sativa
  Clone ID: uC-osroM202038a04b1
gttctcttttaaataagattccagagttcaatgaactgggtcaccataacagatggcgtgaagcactagatcgtctgcttgagacgaacaacttccctgaatttactggaagagtatgccctgctccctgtgagggatcatgtgttcttggcattattgaaaatccagtatctatcaaaagcatagaatgtgcgatcatagacaaaggttttgaagagggatggatggtaccgtggcctccacttcaaagaacaggaaagaaggttgccatcattggaagtggctccgctggtttggctgctgcagatcaactaaacaaaatgggccattttgttactgtgtttgaacgtgctgatcgattggtggtctgatgatgatgggagtgccaaacatgaagacagacaagattgacattgtgcacgccgtgtcaatttaatggcagaagagggcattacatttgtagtgaacgctaatgtaagcagtgat

SEQ ID NO: 43470 - DNA, 427 bp, Oryza sativa
  Clone ID: uC-osroM202038a05b1
acgcatcttccttgttctgtactcccaaccttttcctgctctgcttatttatactactagtcctccattgatatggccaccgaggtgctgaacccacacaacgctgtcctgccttccccggcacagcggaggatccgtgccaccggcgccactcaccagaggacggccaacaaccatcacagcgatgcaaggaccaagccgacgacggcgggaagccggagacgtcagggcaggggctcctccgccgccaggaacgcggccgataggcctgtagcgtggaaggtgtacgccggtccggcattctccgcgtcccccgagccgagctctgtgccgctgccgcagttcccgttcaggaaggccgtcgtcacagccgccgtcgatgacgccgtgacgcgcgacctccgacgcatgctgcggctggagtagt

SEQ ID NO: 43471 - DNA, 329 bp, Oryza sativa
  Clone ID: uC-osroM202038a06b1
ctctgttttcttcagctgggaaactcaatcggggattgtttgggtaaacaaagacgctggacgtccaaggctggcggcgaagcccaaagaacctgaacctgccaatcagtctcgatcatcagagcgtaaccagcgtctgagctcttctcatggcaccgatcccagttacaagaccagcaggtcaagctctgacaggagggaccataggcgctccattgattacgtcgaggatcaccgctctagtgattacgccgaggatcaccgcagcagcaagagaatgcgcgcgttttctccatcttcaaccggtggtgacaggcacagcagagcga

SEQ ID NO: 43472 - DNA, 491 bp, Oryza sativa
  Clone ID: uC-osroM202038a07b1
tcgatctaatcccccaaaccaaaaccaaacgagatccctcatttccacctgggaatctctgcgcgcgatggccggaggcggcggcgcgggctcctccacgggcggctccggcggcggaggcggaggggggcgggagggcgactgggactgcggcggctgcggcaaccgcaactacgcgttccggtcgctgtgcaaccggtgcaagcagccccgcctcctggtcgaccccaacacccctcccgactccaagtggctcccccgcgccggcgactggatctgcaccggttgcagtaacaataattatgcatccagaaagaactgcaaaaaatgtggcctgccgaaggaggaagcagcaatgccagcattatcaatggcaggaatggctatgccagcttatgcaaattatattgctaggatgcaaggccttgctggctctaagatgaacatgaaacttgggatggctggcaattcagctttgcaacagcagctac

SEQ ID NO: 43473 - DNA, 481 bp, Oryza sativa
  Clone ID: uC-osroM202038a10b1
ggttcccaacgcccgcgaaaccctagcggtcgggctcgcccaccgccttgctctggccccctaccctaccccgagctcgccacccgatccgatcgaagatgcataagctggggagaggaagccgcgacaaggtgcagcagttcatgaccataactggtgcgagtgagaaggtcgcccttcaggccctgaaagctagtgattggcacttggaaggagcttttgattttttctacagccaaccacaaatttctctgacgaactctcggcatcttgaagatctgtacaacagatacaaagaacctgatgttgatatgatcatggtgggaaggtgtatctcagttttgcactgatcttcaggtggatccccaggatattgttatgcttgtcatatcatggcacatgaaagctgcacaatgtgtgaatttactcgccaggaattcattggtggactgcagtcaattggggtggattcaattgaaaa

SEQ ID NO: 43474 - DNA, 493 bp, Oryza sativa
  Clone ID: uC-osroM202038a11b1
tcggtcatcttcagctgggaaactcaatctatgattgactgggcaaacgaagacgctgcacgtccaaggctggcggcgaagcccaaagaacctgaacctgccaatcagtctcgatcatcagagcgtaaccagcgtctgagctcttctcatggcaccgatcccagttacaagaccagcaggtcaagctctgacaggagggaccataggcgctccattgattacgtcgaggatcaccgctctagtgattacgccgaggatcaccgcagcagcaagagaatgcgcgcgtcttctccatctccaaccgggtggtgacaggcacagcagagcgaggtccaggtacagttccaggaagcttacttacgaggattcatctccaccggtggtgacaggcacagcagagcgaggtccagtcacagttccaggagccttacttacgaggattcaagcgatgatgagcgcaacttaagaggagatggggaggcaaaagatagat

SEQ ID NO: 43475 - DNA, 492 bp, Oryza sativa
  Clone ID: uC-osroM202038a12b1
tcggtcatcttcagctgggaaactcaatctatgattgactgggcaaacgaagacgctgcacgtccaaggctggcggcgaagcccaaagaacctgaacctgccaatcagtctcgatcatcagagcgtaaccagcgtctgagctcttctcatggcaccgatcccagttacaagaccagcaggtcaagctctgacaggagggaccataggcgctccattgattacgtcgaggatcaccgctctagtgattacgccgaggatcaccgcagcagcaagagaatcgcgcgtcttctccatctccaaccgtgtggtgacaggcacagcagagcgaggtccaggtacagttccaggaagcttacttacgaggattcatctccaccggtggtgacaggcacagcagagcgaggtccagtcacagttccaggagccttacttacgaggattcaagcgatgatgagcgcaacttcaagaggagatggggagggcaaagataga

SEQ ID NO: 43476 - DNA, 273 bp, Oryza sativa
  Clone ID: uC-osroM202038b02b1
atcctctcttcttcttcttcctcctcacaactcacaatatttcagagtagtatacctttcttgctagctagctagcttgttcatcgatcttgttttgaggtgctgagatagctaggatggtggtgaagaaggcggcgacgatggcggaggcggaagcggaggaggagatgatgatgaggatgatgtgtggctcaggaggcaacgagatgatgaagactatgatgaagaataagaatagagaaggggaagaagaagaagacgcaagtggaggag

SEQ ID NO: 43477 - DNA, 320 bp, Oryza sativa
  Clone ID: uC-osroM202038b03b1
accgtgttatctcttggacgccgcgagccgagctgagctacgccatggcagaggcggtggcgctggcgctgattctgctgctagcggcaaagccgatccgatcgaagacgcaaaacgtgggaagaggaagccaggacaaggcgcagaacctcacgaacataactggtaccagcgagaaaggcgtccttcaggccactgcaagctagcgactagcacttggaaggaggttgagatatccgctacagccaagcacaaaatcatctgacaaactttcggtattttgaagatctgtccaacagaaacaaagaacctgacgatga

SEQ ID NO: 43478 - DNA, 403 bp, Oryza sativa
  Clone ID: uC-osroM202038b04b1
ttactgaaatggaccgatgcatgtcaagctagctctgcttcacagtcgcggcgaacgcctgggtgccacctcatcgtatataccaatgagttgattgcactcttatctaggcacgttaaccagggaaagggaatgctccagcgtcaccagctgcttgcggagtctcgacgccttgatcgaagctgacaaaagaaaaatatgctcccgtgagaagacatacctccgggctgctcaggaagccattgtgctgccgccctgggttgcactggccatcaggccaaggcctggtgtctgggactacattcgggtgaatgtaaatgagttggcagtggaagagcttggggctcctgagtacttggcattcaaggaacagcttgctgatggacacaccaacagcaacttt

SEQ ID NO: 43479 - DNA, 165 bp, Oryza sativa
  Clone ID: uC-osroM202038b05b1
ctcgaccttacatccatacgagcccggcgcggagtagcgagaagagaagggggggagggcgcagcaatagccccaaagaagctgtacaggacgacgctcgcgtggcacgtgacgaggagccacccggagctggaggaggcacgaccccagtacgagaccgagccg

SEQ ID NO: 43480 - DNA, 350 bp, Oryza sativa
  Clone ID: uC-osroM202038b06b1
tctgttctgctttgaccgaacagagggccggaacggggtgatgttgaccgaccgggggatcttttggctctacccggacgtgattcgatgtgctgatgaatatccagaatgggccaaccactttttgagagaacacgatcgggcaatggtccaagacgaacgcgtggtgcaaaccattctgaagtcccggggctttgaggagtactatcacgccgctcgtttggccaaccatccaattgaagagcggttcactgcccctgggaaagcacgcgctgtgaccgtcatttgccgcttcaaaaacaggattgctccgccccagttgccgtgcagcggtctcgtcaacctgatga

SEQ ID NO: 43481 - DNA, 365 bp, Oryza sativa
  Clone ID: uC-osroM202038b07b1
ttgccttctttgaggattttttgaccaactggggatgggcttatatttattagaggatccgtcttcggttcaaaataggggatacagtgtagttacatgatgttcattcttaatgctgggaccttgaaagaggtatcttagaaaactgaacagaccaaagggactagtacattgcatttaccaatataacacaacagaagagagcaaacattagactggagtagaattctattttgtagcctgggcaatgatgttgctcatagagctagctccctctttagctgcctctaccaatgaatcctgcgcagcaattagtcttgcaccatttttcttgctagattaccgaagcttaccagcgaggagaa

SEQ ID NO: 43482 - DNA, 504 bp, Oryza sativa
  Clone ID: uC-osroM202038b08b1
ggctagcccagcgtttctttaaggaggaagagcagctataggcgaggcaggaaaagaagtgaaatctctccgttagacaggaagaggaaaagcaagggggaattggggatggcgtcaaagaggatacagaaggagctcaaggatctgcagaaggatccccctacatcatgcagtgcaggtcctgttggtgaagacatgttccactggcaggcaacgataatgggtccatctgatagcccatatgctggtggagttttcctagttaccatccacttccctcctgattatcccttcaaaccacccaaggtggcgtttcgcaccaaggttttccatccaaacatcaacagcaacgggagcatttgccttgacatccttaaggaccaatggagcccagcactaaccattttcaaggtgttgctgtcaatctgttccctgctgactgatccgaaccctgatgatcctctggtccctgagatcgcccacatgtacaagacagataggcac

SEQ ID NO: 43483 - DNA, 453 bp, Oryza sativa
  Clone ID: uC-osroM202038b09b1
ggttcccaacgcccgcgaaaccctagccgtcgcgctcgcccaccgccttcctctccccccctaccctaccccgagctcgccacccgatccgatcgaagatgcataagctggggagaggaagccgcgacaaggtgcagcagttcatgaccataactggtgcgagtgagaaggtcgcccttcaggccctgaaagctagtgattggcacttggaaggagcttttgattttttctacagccaaccacaaatttctctgacgaactctcggcatcttgaagatctgtacaacagatacaaagaacctgatgttgatatgatcatggtggaaggtgtatctcagttttgcactgatcttcaggtggatccccaggatattgttatgcttgtcatatcatggcacatgaaagctgccacaatgtgtgaatttactcgccaggaattcattgggggactgc

SEQ ID NO: 43484 - DNA, 498 bp, Oryza sativa
  Clone ID: uC-osroM202038b11b1
tcgaccttccatccatccgcgcgcggtgcgtagtagcgagaagagaagggggggagggcaaagcgatggctccgatgaagctgtacgggtcgacgctgtcgtggaacgtgacgaggtgcgtggcggtgctggaggaggccggcgccgagtacgagatcgtgccgctcgatttctccaaaggcgagcacaaggcccccgaccacctcgccaggaacccctttggtcaggtgccggctttgcaagatggtgacttgttcctctgggaatcacgtgcaatttgcaagtatgtatgccgcaagaacaaaccagagctgttgaaggatggcgacctcaaggagtcagcaatggtggatgtgtggcttgaagtggagtccaaccagtacactcctgcactgaaccccattctttttcagtgcctaatccgtccgatgatgtttggggcaccccccgacagatagttgttggagagaaccttgagaagctgaagaggtgttggag

SEQ ID NO: 43485 - DNA, 442 bp, Oryza sativa
  unsure (1)..(442): unsure at all n locations
  Clone ID: uC-osroM202038b12b1
tcggttcagctctgaccgagcagagggccgcaacgaagtgatgctgcccgaccggattatcgtttggctttacccggacgtgattcgatgtgctgatgaatatccggaatgggccaaccactttttgagagaacacgatcgggcaatggtccaggtcgaacgcgtggtgcaaaccattctgaagtcccggcgctttgaggagtactatcacgccgctcgtctgcccaaccatccaatcgaagagcggttcactgccctggcgaaggcgcgcgctgtgaccgtcatttgccgcttcaaaaattggattgctccgccgcagttgccgtgcagcggtctcgtcaacctgatgaagcgcgaccccgccggacgcattcccttctcatcgttntgcggagtggtgacgaatgtgctgccggccatagaccgtcagatcagcacgggc

SEQ ID NO: 43486 - DNA, 495 bp, Oryza sativa
  Clone ID: uC-osroM202038c02b1
ctctcaaatccgtgacgctctctccacacgctataaatgtggtgctcgtgtcgccgagatgaggcttgaagcggctcgcttagtaataaaggcagcaaggcctagccactccccgcgcgcgcgccgaagattctcagcaagattctgagccgtcgtcggccgttcgtccgtccaaggaaaggagagccatggtgggaacctcctcctggtcgtcgtcctcgtcgtcgtcgctcggctccctcgacgacgacatcatcgtcgcgtgcgtcgtcaaggcagcggacgccgccgtcgagggggcgtgcgtcaagttcctctgcagctacggcgggaggatcctaccacgccacgccgacggcgcgctgcgctacgtcggcggcgacaaccgcgtcgtctccgtcgaccgctccctccctttcacgagttgcaacggaagctgagggagatgtgcgggtgggaggcggtgtgcctgcggtgccagctcccgacggagga

SEQ ID NO: 43487 - DNA, 471 bp, Oryza sativa
  Clone ID: uC-osroM202038c03b1
gtttcttttatttctcctctgctcgcggcgatggcggcggcgaacggcggctacagcaaggggttcgaggtgccgaagctggagatcaagttcaccaagctcttcatcaatggccgcttcgtcgacgccgtctccggcaagacattcgaaacccgtgacccgcgcaccggcgaggtcatcgccaagatcgccgaaggagacaaggccgacatcgacctcgccgtgaaggccgccagggaggccttcgaccatggcccctggccaagaatgtccggctttgcgaggggaaggatcctgcacaagttcgcggacctggtggagcagcacgtggaggagctggcggcgctggacccgggtggacgccggcaagctgttcgcgatggggaagctcgtcgacatccccggcggcgcgaacctgctccggtactacgccggctcggcggacaaggtgcacggcgagacgctcaagat

SEQ ID NO: 43488 - DNA, 501 bp, Oryza sativa
  Clone ID: uC-osroM202038c04b1
gcgtgccgtccgtgacctgcgtcgtgctcagtggcctcgtcagcttcgcgctcgacgtcgcggaggagctcggcgtgccggcgttcgtgctctggggcaccagcgcctgcggcttcgcgtgcacgctccggcttcgccagctccggcagagagggtacacgccgctcaaagacgagagctacctgacgaacggttacctggacacgccgatcgactggatcgccggcgtgccgacggtgcgtctcggcgacgtctccagcttcgtccgcacgctcgacccgaccagcttcgcgctgcgcgtggaggaggacgaggcgaacagctgtgccagggcgcagggcctcatcctaacacgttcgacgacctcgagtccgacgtgctcgacgcgctcagggacgagttcccgcgcgtgtacaccgtcgggcccctcgccgtcgaccgtgcgaacgggggactgagcctgtgggaagaggacgcggcgtgcatggcgtggctcgatgc

SEQ ID NO: 43489 - DNA, 475 bp, Oryza sativa
  Clone ID: uC-osroM202038c05b1
gagaaagaagagcgcgccgcgccatgtgcggcggtgcaatcctcgccgatttcaccccggcgagggtgccccggcggctgaccgccgccgagctcctgccggtgaccccgactccccccgtcgccgagaggagaaccacccggaagcgcaagtccgacgtcgacttcgaggcggagttcgagcttttcgaggacgacgacgacgactatgagttcgagctttccgacgatggcgacgagagtttggccgcgtcatgtgtgtcgtcccccaagtcgaaggcagtaccttcgttttctttttcgtcggatgtctcctcgagctccaggccgcggcggcgcgtggcggcagcggcggccggtcgtcggcaggcgagcaagaagagcaagtacgttggcgtacggcgcccgccgtcgggaaggttcgcggcggagatcatggacccaaagaggggcggcgcgtgtggcttggcacgtac

SEQ ID NO: 43490 - DNA, 428 bp, Oryza sativa
  Clone ID: uC-osroM202038c08b1
ccctcatcgagcagtggaatgacttttcggccacagaggttgatgctaatattggaaaatggctctacccacggctaggaattgctccctatgttgctgtgagtgaggaagcagctattgctgctttgaagagatcattgggtgccctcaacacacaccttgcatcaaacacataccttgttggccattcggtgactcttgctgatattgtgatgacctgtaacctctacatgggctttgctcggatcatgaccaagagttttacttctgagttccctcatgttgagaggtacttctggaccatggttaatcagccaaactttaagaaagtcttgggtgatgtgaagcaggcagagtctgtcccaccagttcaaaagaaggctccaccaccaaaggagcagaagccaaaggaagccaagaaagaagct

SEQ ID NO: 43491 - DNA, 478 bp, Oryza sativa
  Clone ID: uC-osroM202038c09b1
tcggtttgccaaagcattccaccgagcaggagccttccgccctcttcgctcctgcatcgccctgcccttcgccgcaaccgccgccgcgaccactttctacaatccctactgctcccccgccctcgtctcgaccgcctcccaggtcctccaccagactcgcaacatgcactccaaggtcgtcatcatcggctccgggcccgccggccacaccgtcgccatctacgcctgccgcgccgacctcaagcccgtcatgtacgagggcttcctcgccctgggaatcgccgccggcggccaggtcaccaccaccgacgaggtcgagaacttccccggtttcaagatgatccagggcgccgacgctcatggaccagatgcgcgcgcagagcgaggcctgtggcaccgagatcgtcttcagaccgtggcaaggtcgacctctctcagagacctttaagtactggctcaaccccatggcgacgaccag

SEQ ID NO: 43492 - DNA, 492 bp, Oryza sativa
  Clone ID: uC-osroM202038c10b1
gctatggcaatggcgaccatcccggaggtgcctgcgagcgcgctgctcccgaccatgccgcgcatcggcatgggcacggcggcgttccccttcacctcctccgaggaaaccacggcggcgctgctccgcgccatcgagctcggctaccgccacttcgacacggcgaggctgtacgcgacggagggctgcgtcagcgaggccgtcgcggaggccgtccggcgcggcctcgtcgcctcccgcgccgacgtgttcgtcacctccaagctctggtgcagcgacctgcacgccggccgcgtcgtgccggcggcgagggagacgctccgcaacctcgggatggactacgtcgacctgctcctcgtccactggccggcgaccgtggcgccgggcagctacgacttcccgttcccaaggaggagatggcgccggcgttcgacatggagggcgtgtggcgcggcatggaggagtgccaccggctgggcctcgcgcgcgcca

SEQ ID NO: 43493 - DNA, 207 bp, Oryza sativa
  Clone ID: uC-osroM202038c11b1
catgtgcagagtgcagctttcttttagccatgcactggtccatctccatgcgtgcatggatgtatgttgcgttcagtttctgcatgtttgttacacctagtttgatcggtttggtgaatgttttctagttgggttcaaacttccctgttaaatttcctgcgtgaataaaatagagcatactcagtatgcatgagcatattggcatcc

SEQ ID NO: 43494 - DNA, 471 bp, Oryza sativa
  Clone ID: uC-osroM202038d01b1
ctctcaaatctcgtgacgctctctccacacgctatagaatgtggtgctcgtgtcgccgagatgaggcttgaagcggctcgcttagtaataaaggcagcaaggcctagccactccccgcgcgcgcgccgaagattctcagcaagattctgagccgtcgtcggccgttcgtccgtccaaggaaaggagagccatggtgggaacctcctcctggtcgtcgtcctcgtcgtcgtcgctcggctccctcgacgacgacatcatcgtcgcgtgcgtcgtcaaggcagcggacgccgccgtcgagggggcgtgcgtcaagttcctctgcagctacgggggaggatcctaccacgccacgccgacggcgcgctgcgctacgtcggcggcgacaaccgcgtcgtctccgtcgaccgctccctccctttccacgagttgcaacggaagctgagggagatgtgcgggtgggaggcggtgtgc

SEQ ID NO: 43495 - DNA, 486 bp, Oryza sativa
  Clone ID: uC-osroM202038d02b1
gctccatctttgaagttaatgggaatcctattacaaaacacatgggtttcttaattttcaagtttagagagtacaattgcactgtggagtattacaggtctcctttcatagtccttcaaggtcgtgcaccagctggagcccctgcagtcgtaaaatatacaattagagtagatgccatggattggatgtctggccggggtaagtggaaggatgctgatcttttgatctttaacacggggcactggtggaaccatgagaaaacaatcaaaggtggcgcctatttccaagaaggcaacgaggtcaaaatggagatgactgttagagatgcttaccaaagatccatgcagacattgtttcattggcttcgcaatgaagttaacacaaacaagacccagatcatcttccgtacatatgctcctgtgcatttcagaggtggtgactggaagactggagggacctgccacttggaaactctacagatgtaac

SEQ ID NO: 43496 - DNA, 481 bp, Oryza sativa
  Clone ID: uC-osroM202038d03b1
ggctagcttctgctccgacaagcgctctctctctctctgaactccggcgaggctcacgcgcgctccgaagcttcggatagcggcagtagtcagcgcattgatggcgaccgacgcggcagcgactgagcccgaggtggcggcggaggaggctgcggccgccgcgcctgagaccacggccaccgccggggattccaagccggcgaaggaggccaaggccaagaaggccgccgcgccgaggaaggcacgctccaccgacacccacccgtcgtacgccgagatgatctcggaggcgatcgcgacgctgaaggagaggaccgggtcgagccagtacgcgatcggcaagttcctcgaggacaagcacaaggaccacctgccatccaacttccgcaagcagctgctcgtccagatcaagaagctcgtcgccgccggcaagctgaccaaggtcaagaactcctaccagttgcccgcgacgcgcgcgccg

SEQ ID NO: 43497 - DNA, 471 bp, Oryza sativa
  Clone ID: uC-osroM202038d04b1
atcctgagcatgggtggatcatcagccaacatgaatcatggagatggattctcccccttcatgccgtctcctgcaccagccttcaactacgaggatgaccgggctcgcccgtctggtaaggctgttgctgggtggcttaagattaaggccgctatgcgatggggcatctttgtgaggaagaaagctgccgagagaagagctcagcttgtcgagctggaggactagcctagcggaggtcgtccggagtgttcatcttatggaccatgaggcctggccagtctggacagatggtaacacgcctctcttggctggtcttgtacaatagtactgttgaattttatgtttactgatgaaagaaatgggctcagcgatgcaccaggccaggatggtccacatgacgagcttattagtatgaaatggacacccgctgtttgatagctgcttgatggacattatgtaagttttgctagt

SEQ ID NO: 43498 - DNA, 417 bp, Oryza sativa
  Clone ID: uC-osroM202038d05b1
acgatttctcttttgagcgcgcgtctccctgctccatgggccgcggggcccagacgaccagccggtgcgcgccgtagatcccgcgcgccagatccgatgggggagaccggggtggccgtcgcctcctccccgcgcgccgcggtctcctccccgcgcgccgacgcctcctcggcgtcggtcgcgtcgtcgccgcgggcgggcggggtgggcgggcggcaccaccacaggcggtggggtggcgcggcggcgatctcgccgtcgtacagggcggtgctgctcgcgctgtggctggtcgggttcgcgctcgtgttcctgtggcagagcacctcggtgggccgcgcgcggctctacacccgtccgtcgctgctgtcgaagcgcgcgccgtccgcccaggggatggggcagtgggtggccgtg

SEQ ID NO: 43499 - DNA, 359 bp, Oryza sativa
  Clone ID: uC-osroM202038d06b1
gcttctcttctcccctctttaccttttcctcctcggcatggggtccgtggttcgtctagggtttagcgggttgagatggcggcgccggatgtcgagtaccgctgcttcgtcggcggactcgcctgggccaccgacgaccgctccctcgaggccgccttctccacctacggcgagatcctcgactccaagatcatcaacgacagggagactgggaggtcacgtgggtttggcttcgtgaccttctcctccgagcagtctatgcgcgacgccatcgagggcatgaacggcaaggagctcgacggccgcaacatcaccgtcaatgcggcccagtcccgccgctccggcggctgatgcggggg

SEQ ID NO: 43500 - DNA, 306 bp, Oryza sativa
  Clone ID: uC-osroM202038d07b1
ggtataacgaaagcagcaaaagtcacacgcacactctctctgctactactactcttctactgctccactctgctctgctctccgctcccattccctgcggattctatctctctcttctccaattcgcgcgggctcgggcgccgcattggcgcgatctccggattgtgagggggtttgttgccgaattgttgggggaattgcgggtgctggttgggccgatctcgtcgctggagcaggaggggttccaggatcggtgcggctctgcgtgggcattggggaccgtcgtgaccgagactcgccttctgg

SEQ ID NO: 43501 - DNA, 262 bp, Oryza sativa
  Clone ID: uC-osroM202038d11b1
tcggctggatagcatgtgtagaagatgttatacagctgtgatttctatacaacaggcgcggtgcttgtccgacaattgcgacgcaccaaattcaatagaggagacctgtctggacccaagatggtcccggagagccacggtcgtttttgggcgcgctagtacactctttgatatatgacgtgatgcccgctcatcctggtggggatgggcgggcatgcaccaccacatgtggcaggggtggcagcggtggtagattttaccg

SEQ ID NO: 43502 - DNA, 495 bp, Oryza sativa
  Clone ID: uC-osroM202038e03b1
ggttaggttatgttctgatttaccatggcatgttagtcttgaagttgatggaaagaacgtcgaaattccagaggacgcagaaggtgtgattgttctgaacattcctagctacatgggcggtgttgatctttggcaaaacgacaatgaacatgatgatgattttggtttgcaatccatgcatgacaaaatgcttgaggttgtctgtatatctgggacgtggcatctaggaaaactgcaggtgggactctctagagcacacaggctagcccaagggaaagttataaggttgcatctccacagttcattccctgttcaggttgatggtgagccatggatccagccacccgggtgccttgagatatctcatcgtgggcagatgttcatgttgaggaggacatccgaagaacccaccgggcatgccgctgctatcatgagcgaggtcctcatgaatgcagagtgcaatggtgtgattgatgctgctcagaagagattgct

SEQ ID NO: 43503 - DNA, 429 bp, Oryza sativa
  Clone ID: uC-osroM202038e05b1
acgcttttccttttctacacgaccagttcctggtttctgctgccttccctcggtctggatcaacaagaggaggtcgtccaatggcgagtggtgggagcagcaatgccgggagcctgacgcagtggctgagggagaaggggttcgacgaggaggccatcgggcggatgtcgagacggtgcaagaaccttcacggccttgacgccggcgaggcctccggggtgtgggactacctcctgaacgtcgtcaagatcgagcggcggaagctccggtacgtggtcaccaagtgccccaaggtgctcaccctgtccgtcgacgacaagctcgtccccacggtgcagtgcctcaccacgctgcaggctaagcccggcgaggttgcgcaggccattgtcaagttcccccagatactgttccacagcgtggaggagaagc

SEQ ID NO: 43504 - DNA, 500 bp, Oryza sativa
  unsure (1)..(500): unsure at all n locations
  Clone ID: uC-osroM202038e06b1
aactactagtcgcggcgaccaagagccaaaccctacgccttctcccctccccctccacctcgtcctccccgcgagcggcggcggccatggattcctcctccggcggcgcgggcggcggcggcggcgcgcagatcaaggggatggggacgcacgggggccgctacgtgctgtacaacgtgtacgggaacttcttcgaggtctcctccaagtacgcccctcccatccgccccatcggccggggcgcctacggcattgtctgcgcggctgttaactcggagaacggcgaggaagttgccatcaagaagattggcaatgcattcgacaaccatatcgatgccaagcggacactgagagaaatcaagctgcttcgccacatggaccacgagaatattattgccataaaggacataattcgccccccaagaagagacaactctaatgatgtctacattgcttctgagttgatggatactgatctncatcagatcatacgctcaaat

SEQ ID NO: 43505 - DNA, 480 bp, Oryza sativa
  Clone ID: uC-osroM202038e08b1
acggttttggcttcgttgtgatttaccatggcatgtgggccttgtagtttatggaacgtacgtcaaaattccagaggacgcagaaggtgtgattgttctgaacattcctagctacatgggcggtgttgatctttggcaaaacgacaatgaacatgatgatgattttggtttgcaatccatgcatgacaaaatgcttgaggttgtctgtatatctgggacgtggcatttaggaaaacttgaggtgggactctctagagcacacaggctagcccaagggaaagttattaggttgcatttccacagttcattccctgttcaggttgatggtgagccatggatccagccacccgggtgccttgagatatctcatcgtgggcagatgttcatgttgaggaggacatccgaagaacccaccgggcattgccgtgctattatgagcgaggtcctcttgaatgcacagtgcaatggtgtgattgatgc

SEQ ID NO: 43506 - DNA, 306 bp, Oryza sativa
  Clone ID: uC-osroM202038e09b1
tcggcttgacaccgatagctagctaactaaggttcccgttggtgtccggcattattccacttggacgaacactagctcaccgggcggccatggcgtctatttccagttctgatcaagctggtcgacgtcggcggctgcgccgccgaggactacgaggagacgctcaccgtgggcgggcgcgtccgggtggacgctgggccagagctactatactacgggcaagtggccgaaccttggcggtgggagacaagctagcgcacaggctagccgaggcgcacgcggtgacggtggagatcaagaacgatt

SEQ ID NO: 43507 - DNA, 495 bp, Oryza sativa
  Clone ID: uC-osroM202038e11b1
ttgcgtttccccactccccgtctcctcctccctcacgcagctcgtcgagatggcgtccgaggcggccaaggtggtggtgccggagtccgtgctccgcatgaggaagcgggaggaggtgtgggcggccgcgagcaaggagaaggccgtcgccgagaagaagaagtccatcgagagccgcaagctcatcttctcccgcgccaagcagtacgccgaggagtacgaggcccaggagaaggagctggtgcaacttatgcgtgaggctcggatgaagggtggtttctatgtcagccctgaggaaaagttgctgtttgtggtccgtatccgtggtatcaatgccatgcacccgaagaccaggaagattttgcagctcttgcgtttgaggcagatctttaatggagtgttcttgaagggcaacaaagccaccattaacatgctgcgcagggttgagccatatgttgcatatgggtacccaaatttgagagtgtccgtgaattg

SEQ ID NO: 43508 - DNA, 189 bp, Oryza sativa
  Clone ID: uC-osroM202038f01b1
ctcgtcgtcccctcgcgccgccgccgccgccgccgccgcggggaagagctagccctagaggagaagcgggggtgagttgccagagaggacaggcgcccccctccgccgaggcggggggggcggcggcggccatgctggcccctgccgccgcgcaagaggccgctcccctcgactagctggcccgccagg

SEQ ID NO: 43509 - DNA, 220 bp, Oryza sativa
  Clone ID: uC-osroM202038f02b1
ccctccgctccctcgcgccgccgccgccgccgccgccgcgtggaagagctagccctagaggagaagcgggggtgagccgggagagaggacaggcccctccctatcccgacccaagacaggccggtcaccccccccacaacaaccacaacccccaactactccccgaccccccggggtcccccaaaccgccccccccctcgacctccccaaggcctacccc

SEQ ID NO: 43510 - DNA, 451 bp, Oryza sativa
  unsure (1)..(451): unsure at all n locations
  Clone ID: uC-osroM202038f05b1
gcttctgttcctcctcctccacttgttgttcaattccccccccccctctctctctctctctctctccgtcgcagatctcggcaagggggcaacaaggcaggaggcggcgatgggttcggcgagccgcgcggtgtcgtgcctgtgctgcccgtgcaagtgcctggcgtgcggcctcttcagctgcctctgcagcatcctcatctccctcctcgtcaccctcggcgtcctcgccctcatcttctacctcatcttccgcccccacatgatcgccgccaccgtcgactccgccgccctcacccagttcaccctctccaccaactccgccctcgcctacagnctcaccgtcgacctcaccgtccgcaaccccaacaagcgcgttggcctctactacgacaacgttgagtccctcgccctcttcgacggccagcgcttcggatacgcccccctcgac

SEQ ID NO: 43511 - DNA, 494 bp, Oryza sativa
  Clone ID: uC-osroM202038f06b1
gcatcgtctcctcctcctccacttgttgttcaattccccccccccctctctctctctctctctctccgtcgcagatctcggcaagggggcaacaaggtcggaggcggcgatgggctcggcgagccgcgcggtgtcgtgcctgtgctgcccgcgcaagtgcctggcgcgcggcctcttcagctgcctctgcagcatcctcatctccctcctcgtcaccctcggggtcctcgccctcatcttctacctcatcttccgcccccacatgatcgccgccaccgtcgactccgtcgccctcacccagttcaccctctccaccaactccgccctcgcctacagcctcaccgtcgacctcaccgttcgcaaccccaacaagcgcgttggtctctactacgacaacgttgagtccctcgccctcttcgacggccagcgcttcggttacgcccccctcgactccttctaccagtccaccgaggcatgcaccaagctcttccccg

SEQ ID NO: 43512 - DNA, 407 bp, Oryza sativa
  Clone ID: uC-osroM202038f07b1
tcggtttaaaaccgtgacgctctctccacacgctataaatgtggagctcgtgtcgccgagacgaggcttgaagcggctcgcttagtaataaaggcagcaaggcctaggcactccccgagcgcgcgccgaagattctcagcaagattctgagccgtcgtcggccgaccgtccgtccaaggaaaggagagccatggtgggaacctcctcctggccgtcgtcctcgtcgccgtcgctcgggtccctggacgacgacatcatggtcgcgtgcgtggtgaaggcagcggacgccgccgccgagggggcgtgcgctaagttcctctgcagctaccgtgggaggatcctaccacgccacgccatctgggcgctgctctacgtagtgggtgacaaccaagtcatgtaggtggacc

SEQ ID NO: 43513 - DNA, 470 bp, Oryza sativa
  Clone ID: uC-osroM202038f08b1
tcgcttctcctccgcatcccccatcccctcctccccggcggcggcggcggcgcggaggcggcggcacgggagcggctagtggtttcgtcggcggaggcggaggcggggccaagatgttcgggcgcgcgccgaagaagagcgacaacaccaagtactacgagatcctgggggtccccaagaccgcctcccaggacgacctcaagaaggcgtaccgcaaggccgccatcaagaaccaccccgacaagggcggcgaccccgagaagttcaaggagcttgcacaagcttatgaggtattgagtgacccggagaaacgtgaaatctatgaccaatatggtgaagatgccctcaaggaaggaatgggtggaggcggatcccatgttgatccatttgacatcttttcatcattctttggaccttcttttggtggtgggtggcagcagcaggggcagaaggcataggaggggagagga

SEQ ID NO: 43514 - DNA, 487 bp, Oryza sativa
  Clone ID: uC-osroM202038f09b1
tcgcttctcctctcctcgcctccgcctccgcctccgcctcccaagaaggcgaaccctattccgcccccgattctcccggagcggggggccggactcccgttgcgcgattgggcggtgaaacccgaatccccctgcgggcggcggcgtccgtttctcatctaccgtcggcgttgggggggacgccgccccatgggccggtcgccagcgatatatcactatcagctcatcgaccggcggaaagggcttggataaaatcttattgcaaatttccccttgtacatgtaacatcacatgtaatttctattaaaaatgacttcactcaataaagttgtttccaatggagatacaaggtcaatgttgccaaataaagtcacagcattgaatcccaacgcagcagaatttgtaccttcatgtattagaccatcttttgagagtagcgctgtctcagatgtaaggaaggcagatcttagggcttcgggaaaactat

SEQ ID NO: 43515 - DNA, 496 bp, Oryza sativa
  Clone ID: uC-osroM202038f10b1
tcgcttttcccgtattgtgaattctaaccatttccgtagattgacaaatttgatagaggataagaaagtcgcccaaaagattgtatatggtggccaaacagatgagaagcaactaaaaatagctcctactgtgttgttagatgttcctcttgatacaacactcatggcagaggaaatttttggtcccttacttcccattgtaacagttgacaagattgaagatagcatccagttcatcaactcaaggaccaagccacttgcagcctatcttttcaccaaggacaagaaactgcaagaggaatttgtgtccaatgtcccagcaggaggaatgcttgtaaatgatgttgccctgcatctcgccaatccgcacctgccatttggcggagtcggcgacagcgggatcggctcctaccatggcaaattcagcttcgattgtttcacccacaagatggccgtcctgatccgcggcttcggaggggaggcaactgctaggtac

SEQ ID NO: 43516 - DNA, 467 bp, Oryza sativa
  Clone ID: uC-osroM202038f11b1
tcgctttccttgcaccaccacctgatcagagaagtagctagctgcaggagagaaaccgaccaacaatggcggagtactactccagcaccgtggacgagtgctacgagaccaccggcaggcagcacggccacgggcacggccacggtcacgggcacgggcacgggcatggtggcatgagggtggagtcccacaccgacgactactacagcgagggcggcgagatcgaccgtgggaggaggaacaactccatgcactcgcaggagtacctgatgaggcagcagagcggccatggcggctacggctacggcggcggccagcagcaggagtactacaagcgggaggagcgcgagcacaagcagcgcgagcgcgtcggcgagatcggcgccctcgccagcggcgccttcgctctctatgaggggcaccaggcgaagaaggtacccgcgaacgcgcagaggcacaggatcgag

SEQ ID NO: 43517 - DNA, 223 bp, Oryza sativa
  Clone ID: uC-osroM202038g01b1
acgctcttaccacttttggttcctgaaattgagtcatggctggggggctagctcgcctccacaggctcctccaacacctccgtgccaccacctttggttatcccaacaaggtgattgcgcccctctcttggagtgatgttaaccaggaaaagggaatgctccatcatcaccagctgcttgcggagctcgatgccttgatcgaagctgacaaagagaaatatgc

SEQ ID NO: 43518 - DNA, 500 bp, Oryza sativa
  Clone ID: uC-osroM202038g03b1
acgcactacccatcggcggtgatcgccatggcgaacaagctggtctcggagatgcgggtacctccccacctcgcccacatgctcgccgcgcgccggctcaccaccgccaaggtcagcccccgccgccgccctccaaaacccctccccctgctccaacaccaaccgccgccgctaaaccccattctacccaggacgtgctgtcgctgccggaggtggagctcatgggcgtcctcgacgccggcatccacaccgcccgcgccgccgtcgcccacgtcagcgagatcgcctgccctccgtaccaaacggcgcttgcgctcctcgaggccttcagggcaagaggagatgggcggctggccaccacgctccgcggattggatgaggcattgcatggaggaatccccgcagggaagctcactgaggtcgctgggccctcggggattggcaagacccagttctgtctgaagctggctttgctagcaacattaccagaatgctatgga

SEQ ID NO: 43519 - DNA, 498 bp, Oryza sativa
  Clone ID: uC-osroM202038g04b1
ctctctaatctcagaccccgaaatctcgaggagcttgtcttttttcggtagcaatggcgttggagcagaccttcatcatgatcaagcccgacggcgtccagaggggcctcattggcgaggtcatcggccgcttcgagaagaagggattctacctcaaagccatgaagctcatcaacgtggagaagtcgttcgccgagaagcactacgccgatctgtcctccaagcccttcttcggagggctcgtggagtacatcgtctccggccccgtcgtcgccatggtctgggagggcaagcaggtcgtctccaccggccgcaagctcgtcggggccaccaaccccctggccgttgagccgggcaccatccgtggcgacttcgctgtcgacattggcaggaatgtcatccacggaagcgactcggtcgagaacgccaggaaggagattgctctgtggttccctgagggcatcgccgagtggaggagcaaccagcacccatggatct

SEQ ID NO: 43520 - DNA, 329 bp, Oryza sativa
  Clone ID: uC-osroM202038g07b1
tcgcactcgccggactctccccttctctctgtctcgctccttcgttcgctcgctttatcccccccgaataaaggcgagaagccgcagcggcggacgaagaagatagaaatggcggcggagacgttcctcttcacctccgagtccgtgaacgagggtcacccggacaagctgtgcgaccaggtgtcggacgcggtgctcgacgcgtgcctcgcccaggaccccgacagcaaggtggcgtgcgagacgtgcaccaagaccaacatggtgatggtgttcggcgagatcaccaccaaggccaccgtcgactaccagaagagacggcgcgacac

SEQ ID NO: 43521 - DNA, 345 bp, Oryza sativa
  Clone ID: uC-osroM202038g08b1
ttgacttgttctagatcgcgagcggccgccctgctgttttattttattaggtgtaccttcccaccttgtccacatcctcgtcgggcgccggctcaccacctccaaggggaggtccacgacgccgcgcacaggaccgctacttctgatacaacaccatccgacgacgtttaaccgaataatacccaccacgtgctgtcacttcctgaggcggagctcatgggcgtgctcgactccggagttcagaccacccgcggcgtcgtggaccactgtcagcgagatcgctctgacctccagaccaaacggtgctcgagctcctcgaggccttcagggcaagaggagatgggc

SEQ ID NO: 43522 - DNA, 480 bp, Oryza sativa
  Clone ID: uC-osroM202038g09b1
tcgctttcctcgatcgagggcacgcgacgcgccatggcgtcggcggcggaggcggcggaggagctcacgaggatgcaccgggagctcccgccgagcaccgccaacgaggaggcggaggcggtggatgcaaaactggtctcggtggacgaacaccgaggcggcgcgcctaaccgaagtgtaccgagaagaggccgccgcctccggaggctgagctcatgggcgtcctggacggcgggatggacagctcccgggccggctgcggccaggcaagcgagatcgcctgcccttcgtaccaaacggagcttgcgctgctggaggcctccaaggcaagaggagaagggcggtctaggcaccacgctgcgtggattggaagaggcattgcatggaggaatccccgcatggacgctcactgaagtcgatgggccctcgccgattggcaagacccaagtttgtctgaagcttgctttgctagcaacaata

SEQ ID NO: 43523 - DNA, 495 bp, Oryza sativa
  Clone ID: uC-osroM202038h01b1
gtgtagagtgtccagcgtactgttatctggatgggaaagaaacaagagtctgttgaggatgttccttgtggtaacactgtcgctatggtcggtctggatcagttcatcacaaagaatgccaccctaacaaatgagaaggaagctgatgcctgcccaatcagagcaatgaagttctcagtgtccccagttgtgcgtgttgctgttcagtgcaaggttgcatctgatcttcccaagcttgttgaaggtttaaagcgtctggcaaagtctgatcctatggtcctctgtaccattgaggagtccggtgaacatatcattgctggagctggagagcttcaccttgaaatctgcttgaaggatctacaggaagacttcatgggtggtgctgagattattgtttcccctcctgttgtctccttccgtgagactgttcttgagaagtccctgcgtacagttattgagcaattcccgaacaagcacaaccgtctttacatggaa

SEQ ID NO: 43524 - DNA, 475 bp, Oryza sativa
  unsure (1)..(475): unsure at all n locations
  Clone ID: uC-osroM202038h02b1
ggcatgctgtgcacaattgccactggactggccattgatgcttatggtccgatcagcgacaacgccggtggtattgctgagatggcagggatgagccacagaatccgcgagagaaccgacgctcttgacgctgctggaaacacaaccgctgctataggaaagggatttgccattgggtcagcagcactggtgtcccttgcactgttcggcgccttcgtcagcatagccggggtgaaggtggtcgacgtcctgtcccccaaggtgatcatcggattgatcgtcggagcaatgctcccgtactggttctccgccatgacgatgaagagcgtcggcagcgcggcgctgaagatggtggaggaggtccggcggcagttcaacaccatccccgggctgatggagggcacaggcaagccggactacgccaactgcgtcaagatctccaccgacgcctncatcaagcagatgatccctcccg

SEQ ID NO: 43525 - DNA, 388 bp, Oryza sativa
  Clone ID: uC-osroM202038h04b1
acgacctaaccttagaactctcctcaaaagaaccaccttacttgatagctctcacaaggctcacgcacacatagagcttgtgagagcttcttctttctctctctcttgtccttgtggtagctggtgcttaaaggaggaggaggtgaggaggaggcgcaacgtccgcacagccattgccgcaccctcggagcagcatgcgggaggcgctggagacggaggacaaggagaaggcggcggcggccaaagagaaagccgacgtccccaagaacggaggcaacgggggaggaggcatgaacggcggcggtaacggcggcggcaacggtggcgccagcgcccagcccggggaggagacgacaagggagattcaggtggtgagggaggcgcaccg

SEQ ID NO: 43526 - DNA, 483 bp, Oryza sativa
  Clone ID: uC-osroM202038h05b1
ggtttatccggtgttggattcagaggttgtccaggtacactttctcatctagaagctgagtcgtgcatgctttctccagatggtttgttggatgtagtgagtggtggtggactggagtatctaaatttgtacaatttgaaaagcccaactggacttgatggcctggacagagttggttatgcgagaagtcttcggtttttaaacctcaggatgtgccgttaccttaccgatgattctgtgacggcaatagctagcgggtgtccattgattgaggaatggagcctcgctgtctgccatggagttcgcttgcctggatggtctgcgattggattgctctgcaacaagctgagaatcttgcatgttaaccgttgccgaaacatttgtgaccaaggtttgcaggctctaggggatggctgtgtatgccttcaagttctgcatatccatggatgtggcaagatcactaataatggtctggcatcattt

SEQ ID NO: 43527 - DNA, 448 bp, Oryza sativa
  Clone ID: uC-osroM202038h06b1
ggtttatccggtgttggattcagaggttgtccaggtacactttctcatctagaagctgagtcgtgcatgctttctccagatggtttgttggatgtagtgagtggtggtggactggagtatctaaatttgtacaatttgaaaagcccaactggacttgatggcctggacagagttggttatgcgagaagtcttcggtttttaaacctcaggatgtgccgttaccttaccgatgattctgtgacggcaatagctagcgggtgtccattgattgaggaatggagcctcgctgtctgccatggagttcgcttgcctggatggtctgcgattggattgctctgcaacaagctgagaatcttgcatgttaaccgttgcccaaacatttgtgaccaaggtttgcaggctctaggggatggctgtgtttgcttcaagttctgcatatccatggatg

SEQ ID NO: 43528 - DNA, 434 bp, Oryza sativa
  Clone ID: uC-osroM202038h07b1
atccatccatggatcgagatttcctcttgtccctgttcttgttgttgttgttctctgtgaatttaacaggaaatcaagaactaggtgctggttttgactaacaagaactcggtcgaacacttggtgcgtgttgttggtggtatggcttggccggcggccggcacacggccgtgcaaaaactaagaggctacactgttggggccttcttgcttattgagctggcggaagcggacgacgtggctgccgcgaggagggtcgtggaggaggagaaggtgtctcttggcgtggctgggttgtggtatgggccttcggcgagcggcgtggcgaggctcgtgatggagcggaggacggcggcgatggtggcggcgctgtacgggagcacggtggtgcttgggtatgtcgtggcggcagcaccggcggagggcgctcgcgcg

SEQ ID NO: 43529 - DNA, 351 bp, Oryza sativa
  Clone ID: uC-osroM202038h08b1
atccatccatcgatcgagttttcctcttctccctcttcttgttcttcttgtcctctctgaatttaacaagagatcaagaactaggtgtttgttttgactaacaagaactcggtcgaacactctgcgtgcgtgtttgtttgtgtgtgtcatgtgctctgggccgcgcaagccgtccacaccgccgctgccgcagcagcagaaggaggcgacggtgatggcggcgtccttgcttcttgagctggcggcagcggacgacgtggcggcggtgaggagggtcgtggaggagagaaaggtgtctcttggcgtggctgggttgtggtatgggccttcggcgagcggcgtggcgaggct

SEQ ID NO: 43530 - DNA, 188 bp, Oryza sativa
  Clone ID: uC-osroM202038h09b1
tcgcgttagagagccagccagccagccagccagacaggttcttcttactcgtccctgtgttgctgcttctgctgctgctgccgccttgtgtatctcctttggcttcttctgggtacctgccggccggttaagctagctgatcgccggccgccggctctcgtagagctcttttgggccccgcccggggt

SEQ ID NO: 43531 - DNA, 477 bp, Oryza sativa
  Clone ID: uC-osroM202038h10b1
gcttaacacgtcggagccggcgggcgccgacgcggcgttcaagagcgtgaaggtgaagctgtgctacgcgccggcgagccggacggaccgcgggtggcgcaaggcctccgacgacctgcacaaggacaaggcgtgccagttcaaggtcaccgtgcagccgtacgccgccggcgccggcaggttcgactacgtggtggcgcgcgacatcccgacggcgtcctacttcgtgcgcgcctacgcggtggacgcgtccggcacggaggtggcctacgggcagagctcgccggacgccgccttcgacgtcgccgggatcaccggcatccacgcctccctcaaggtcgccgccggcgtcttctccaccttctccatcgccgcgctcgccttcttctttgtcgtcgagaagcgcaagaaggacaagtagatcgtcttgctgcaaacgcaagttcgcagcttcagtggactgaattccgttatcgg

SEQ ID NO: 43532 - DNA, 475 bp, Oryza sativa
  Clone ID: uC-osroM202039a01b1
cattgatggtaggttctggatccagatcatgggggtgttcatgatgaccgtgttcatgctcgcgctcggcgtgccctacgaccactggacgcacccggcgcaccacaccgggttcgtcgtgctctacgcactcaccttcttcttcgtcaacttcgggcccaacagcaccaccttcatcgtgccgggtgagatcttcccggcgaggctccggtcgacgtgccacggcatctccgccgtgtccggcaaggccggcgcgatcatcggcgcgttcgggttcctgtacgctgcgcaggaccagcacaatcccgacgcgggatactcccgcggcatcggcatccggaacgcgctcttcgtgctcgccggcacaaacttccttggtatgctcatgacgctgctggtgccggagtccaagggcttgtcgctggaggagatgtccaaggacaacgtcgttgacgagaccgcccaagaagcgatc

SEQ ID NO: 43533 - DNA, 432 bp, Oryza sativa
  Clone ID: uC-osroM202039a02b1
cttgttcacagtcgcagcagcagcagcaccgggccggtgctttctccctccaaagtgccccctgttttgcttccgctttgaccctcttaaaaacctcaataactccaaattttcccaccgcctaataatccccattaccgtctcctctgaatcgttggatttgatacccccagggattcacagagagagagagagagagagagccaagaaaccctgtagctgctgtaggacgagtaggagtaggagtggttttgcttcctctgttcttgtgttgggattgaggaatgaagagcccgtctcccgtggatcctgagtcgtcgagttctcccgattgcaagggagggagcagcagcaagaggaggcggctgtcatggcggatgacgatgagcctggcgtaccagaggctcggggtggtgtaccgggacctgagca

SEQ ID NO: 43534 - DNA, 341 bp, Oryza sativa
  Clone ID: uC-osroM202039a03b1
cttggatttggggattttcggcccaatctcgctggtgggagtactttcccgccgcagcggtggatctcgataggcggaggcccctcccctgatctcgcgtggagcggaagggagatccatgatccatctagggaagtgttggagaattttaatcataaattgacatgtaaaggagaggaggcaagctatatgaaactgaaataggttcggtgggataccatggttgacatagaccctgatcacatctttgaggttgcagacacccctgaccgtatacagcatacaacatgccctggatctagcccagctgctagtagaggtattggaaatgcacctggaac

SEQ ID NO: 43535 - DNA, 467 bp, Oryza sativa
  Clone ID: uC-osroM202039a06b1
gtttccttcgcgtgagcggcagcaagtgttcagggcgggcttcttctcgatttagctttcttggtttcttgatctgtagcttattagcggccatgtgcggcggagcaatcatctccgggttcatcccgccgtcggccgctgcggcggcgaggaggaggaggacgacgacgacgtggtcgtggtggtccccccgccggcggcggcgaggttcgtcgtccgtgccgcggccaaggcggcgcccccaactgcagatgggatgttgactacaaagcttgtccaacatgatggacctactgctagatcagcaaagcacaagaggaagaatcagtacagggggatccgccagcgtccctggggcaaatgggcagctgaaatccgagaccccacaagggtggccgtgtttggcttggaacatataacactgctgaggaggcagctagggcatatgacgctgaagcccgcaagat

SEQ ID NO: 43536 - DNA, 322 bp, Oryza sativa
  Clone ID: uC-osroM202039a07b1
ttcctccattggttcctgaaattgagtcatgggtgggaagtttgttcgtctggagagttttcttgaacgcctcggtgccaccttctcgtctcatcccaatgagttgatagcactcttctctaggtatgttaaccagggaaagggaatgctccagcgtcaccagctgcttgcggagttcgatgcctaggtcgaagctgacaaagagaaatatgctccctctgaagacattctccgggctgctcaggaagccattgtgctgtcgccctgggtggcactggccatcaagccaaggcctggcgtctgggactacattcgggtgaat

SEQ ID NO: 43537 - DNA, 471 bp, Oryza sativa
  Clone ID: uC-osroM202039a08b1
tttggtcgctacacaccactactctcacaacgggggggaggatctataaccgcggaggggttactcaccatagcggcgggggccgccgcacaagcgccgggtcccgcaacgacgccggcggagggcgccacggggccgccgaacgtgacggcgggcctggagaagggagggcagtacacgacgttcatccggctgatgaaggagacgcagcaggacacgcagctgaacagccagctgaacaactccttcaacggcaacggctacaccgtgtgcgcgcctaccgacaacgccttcaacaacctcaagccgggcaccctcaacagcctgacgcaacagcagcaggtggcgctcgtccagggccaccgcctcccccaggctactccatggactccttccagacggccagcaaccccggccgcacccaggcgttcgggaccgacggcccctacacccttaacaaaaccttcacca

SEQ ID NO: 43538 - DNA, 319 bp, Oryza sativa
  Clone ID: uC-osroM202039a10b1
ctggatctagaaaggaaggacgcttaataagggagggggtgatatagaaaggcgggtgatttaaccaccccggggccgtggcaattgacgccaccgggggagcaaaaattgtaggagcggccctgaggcagacccagttcgacagccctcttccatggatgcagcccactggcaccaggggctagggctggcgaagcccatggaggagatgctgatggcagcgaacgcggccgccggcgcgaaaccgaatccagccgcgacggcaccgtcgtccgggactgggggcgcactgaggggcggcagactgctgtggcgcccc

SEQ ID NO: 43539 - DNA, 498 bp, Oryza sativa
  Clone ID: uC-osroM202039b03b1
aattccttattccatcccatcccagtccacggtgaggttgagcgatctgaaaaaaatcatcagcgacgagcagcaacaggtttgttctctgaacttctctgatctttttagaagcaggtaacacacaagaaaggtcctgtcccaagaaggtacttctttcgggtttattagatcgaaagaggagttcttgtgcgtacaggttctttctcatcccatcaacttctcctaggaggaacagagatccagagaaccttttttctcttctggattcttgccgatttttaggctttctttgcttttctaaggccagaaagggttgttttgcaatacccttttagttaatcctctcaaatctttcttctttctattcaaaagctctttcttttctttgaaccctttggttctcctatttttattgaggaacagggcttgttttttcactttttgcctccaaaaagccccccttttttttttcctgttttaagatttcataccctt

SEQ ID NO: 43540 - DNA, 439 bp, Oryza sativa
  Clone ID: uC-osroM202039b04b1
tgttattttgccaccaccacaccacagagagcccgagggccctactgaacttctctccggttcttcctctcccgcaagcaaagcgcacgccgcctttgccttagatctcctcgactccgccgccgccgccggcgcctccccacggtccctccctcgccatggagggtaacagtaccaacctcgatgcggcgatagagtcgctcctcaacgtggagaagcagatgaggctggccggcgatgtcgccggctcgaggaaggccgtcatcgacatcgtcgagctctgctacaaggccggcgcctggaagacgctcaacgatcagaccgtggtcctctccaagaggaggggccagcttaagcaggctatcactgccatgggtcagaaagcaatggagtacattgacttaacccccgacatgggcacacgtattgagctaataag

SEQ ID NO: 43541 - DNA, 141 bp, Oryza sativa
  Clone ID: uC-osroM202039b06b1
cccaaccaagggctacatatagattgagccaggggtgaagcacaacatgaatggatggaggaagtaaagtcaagatgagcaggacgaagaaaagaccatgacaactgccacagtggctgggctactccacgggaaggcaca

SEQ ID NO: 43542 - DNA, 477 bp, Oryza sativa
  Clone ID: uC-osroM202039b09b1
tggattcagaaagggaagaagctgcagaaaagatttcggtgatggggaggtcttcaccaaatgacaagcttttacttgttaaagcattaagaaaaagaggtcatgttgttgctgtgactggagatggcacaaatgatgccccagctttgcatgaggcagatataggtctctccatgggcatccagggaactgaagttgccaaggagagttctgatattatcatcttggatgacaattttgcatcggtcgtgagggttgtcagatggggtcgctcggtttatgcaaacattcagaaatttatacagtttcagttaaccgtcaacgttgcagccttgattataaccgttgttgctgctgtcagttctgagaatgtttccctgaacgctgttcagctactgcggggtaacctaatcatggatactctgggtgcttttgcactgcccatagattcacctactgaccattttatgcagtgac

SEQ ID NO: 43543 - DNA, 472 bp, Oryza sativa
  Clone ID: uC-osroM202039b11b1
tttcttgagcccaaaccttcgtaggtctctgaccacagaaatggataaatatggcaggtatgatccaagtgaaattcaaggcgagagccgttcttcatctggtgcttcaaagaatgttagttctggttcatggggtcctagtccatccagttctgcaccaactgatgatactggttcaagtcaaacaggggttaagactcgtgaagagagacttttagatacaattgcaacttcaagtggtgtgcggttgcaaccaactcgagatgctctgcaaatatttctaacagaagctgccaaattggacgcagttgctttgagccgtgcccttgagaacaaattgaattctcctttatggcaggttcgcatgaaggcaatttgtgtattggaagcaattgtaaggaaacaggatactgatccttattcaatcattacttcatatttctgtgagaacagtgcatctgttgttagatgc

SEQ ID NO: 43544 - DNA, 481 bp, Oryza sativa
  Clone ID: uC-osroM202039b12b1
ttcgatacttcaaagactgctagtgtgttctgttctggctacaaagtttcccagccggctgaggaagatgaaatggattttgattctgaagaagttgaagatgaagaggaggaagaaaagatcattccagctcccagggcaaatggcaaagttgaagggaaggaaaatgagcagaaaaaacaaggcaagacagattcttcagcttcaaaatcaaaggctgcagtgaatgacgatgatgatgatgatgacagtgatgaggatgattctgaggacgaagatctttctcctgaggatgatgatgatgattcttctgaggatgattccagcgaagatgatgaggatgagagtgacgaggaagaaactcccaagaagccagagactggaaagaggaaagtagctgaaattgtgttgaagacaccttcgtctgataagaaagcaaagattgctacaccgtcaggccagaagacaggtgacaagaggg

SEQ ID NO: 43545 - DNA, 492 bp, Oryza sativa
  Clone ID: uC-osroM202039c01b1
gttctgttggctactccttcctcctcaagaagggcaaggccataattgtgcaaccggagcgtgtcatcgtcgggaatggcccggcgtttgggtgcgtcatgatgaaggagttcttatctgagctggctaagcgcgtcaacaagaacaccactgcttatgagaactacaagaggatcttcgtgcctgagggccagccgctggagagcgagccgaatgagccgctgcgcgttaatgtgctcttcaagcacgtccagaagatgctgaacagtgacagtgctgtgattgccgagactggtgactcctggttcaattgccagaagctgaagctccctgagggctgcgggtatgaattccaaatgcagtatggttccattggatggtcagtgggtgcattgctcggatatgctcagggcgctaaggacaagcgtgtgattgcctgtattggtgatgggagttttcaggtgaccgcacaagatgtgtcaacaatgattc

SEQ ID NO: 43546 - DNA, 496 bp, Oryza sativa
  unsure (1)..(496): unsure at all n locations
  Clone ID: uC-osroM202039c02b1
tagatcgcgagcggccttcttttttttttttttttaaaactacagtggctggttttactaaaattcactgttttctcggtgagaattacaaccgcgaaaagggtgcatgccgtgtcgtgtaccatgtttttgttcatttacataaatcgaaaattttgtaaaacaaattggcaaacagcacatcataacgtgtagtacgttgcaacatttcactatccccgtcttcccatctatatcactatctcatctttccatcaggattcttcttgcgccttccattggagcctctgttccagaggacttctgagtcaattgtggtgagatgtggatcatcaagcctcttccatgtcttgatggacttcacaccttgccactcgccgncgttcgacttttcaagctgcacggacaccaccctcgctctcctcgaccacccggcctttccatacgcatggtacccaaattcaccagcatagcacaagtgaatgccattgagctt

SEQ ID NO: 43547 - DNA, 242 bp, Oryza sativa
  Clone ID: uC-osroM202039c04b1
tttctttgaattgaaggaacaggaaaaggcagctaaggataattaaactgttcaaagtgtgcttggtacacccacccgcgactacttactttcgaacaagggagatagggtacccatctctgaccttgagggcaagtacgttggtttgtgctttgtggtgaatggctatggcccagtagtccaatttacctcattgcttgctaaattttatgagaaactcaaagaagtaggggagaaatttg

SEQ ID NO: 43548 - DNA, 411 bp, Oryza sativa
  unsure (1)..(411): unsure at all n locations
  Clone ID: uC-osroM202039c05b1
gttgtctttagcagcaacagctcaaacggaggaagatctcatcgccatgacgaccggcaatggcgacgcaccggtgatcaagaacgcccacagcgacatcgacagcaccaacaagacgctgctcaagagcgacgccctgtacaagtatgtcctggacacgacggtgctgccacgggagccggagtgcatgcgcgatctgcgcctcatcacggacaagcaccagtgggggttcatgcagtcgtcggcggatgaggcgcagctgctggggatgctgctgaagatggccggagcgaagaggacaatcgagtggggtgtcttcaccggctacttgctgctggcgacggcgctggcgctgccggaggacgngaaggtggtggctgatcgacccggacagggagagctacgaagatc

SEQ ID NO: 43549 - DNA, 402 bp, Oryza sativa
  Clone ID: uC-osroM202039c06b1
gcagcaacagctcaaacggaggaagatgggatcgttatgacgaccggcagtggcgacgcaccggtgatcaagaacgcccacagcgacatggacagcaccaacaagacgctgctcaagagcgacgccctgtacaagtatgtcctggacacgacggtgctgccacgggagccggagtgcatgcgcgatctgcgcctcatcacggacaagcaccagtgggggttcatgcactcgtcggcggatgaggcgcagctgctggggatgctgctgaagatggccggagcgaagaggacaatcgaggtgggtgtcttcaccggctactcgctgctggcgacggcgctggcgctgccggaggacgggaaggtggtggcgatcgacccggacagggagagctacgagatcggg

SEQ ID NO: 43550 - DNA, 179 bp, Oryza sativa
  Clone ID: uC-osroM202039c08b1
gtcgccggccgcattcactaccaccactcgccgtcgcctccgccggccgcacgcgctcctcccctcccctcccctcccctcccctctccccggccgcgccgctcgccggatctctcccctcctcccttccaggaaccccagccaagcaggtagcgtgtgacgggggaagggggggatgg

SEQ ID NO: 43551 - DNA, 417 bp, Oryza sativa
  Clone ID: uC-osroM202039c10b1
tcggtatcgtataagactaaagccatagtggtgtctgaatcctttgtgatcaacctgacagcaggttctctgggcaacacgtgcttgggaaacatcatgaagactgaggttgtgctgctgttgatgggcgtggtcgccgcacaggtccaggagcatgccatcaacactgtgaaagacgcaaaggcagaactcttcggcaagatcattgctgctgcgggtgctgacgatgagctggcaaacgccaaggctcgtgtcacagtgttgggccctacagatgaggctgtcaaggccttcctgaaggacatgggtctgactgctgacgacgtgcttaagaaccccaaccttgcccgtgacctggtgggctaccacacaaatctgggtgtggctgcgggacctaaggagctttttgccagggaa

SEQ ID NO: 43552 - DNA, 516 bp, Oryza sativa
  Clone ID: uC-osroM202039c11b1
tcgatttgcattcgcatccacgagaccactcgaacccgacccgtctcgccgccgccgccaccgaagtaatcccttaattggtcaaaatgtctcgggaggagaatgtctacatggccaagctggccgagcaggctgaaaggtatgaggagatggttgagtacatggagaaggttgcaaagactgtagatgtggaagagctcactgttgaggagcgcaacctcttgtctgttgcttacaagaatgtgattggtgcccgccgtgcctcctggcgtattgtctcatccattgaacagaaggaggagggtcgtggcaatgaggaacatgttactctgatcaaggagtaccgtggcaagattgaagctgagctgagcaagatttgcgatggtatcctgaagttgcttgactcacaccttgtgccctcatctactgctgcagaatctaaggtggttttacctcacgatgaagggtgattaccacaggtaccttgcgggattttagactggtgccgagagaaag

SEQ ID NO: 43553 - DNA, 445 bp, Oryza sativa
  Clone ID: uC-osroM202039d01b1
ctctttttccactgtttccgccgccgccgccggcgccgtcgtcgcccgccgcgccggcgttctccccccgccgacgaagcacggcgtggagtgtagacgcagcctcctcgctctctctcacgccggcgagcagggtctggagccaggagcgacgcggcggccggggccggggcctccatctcggttcgaaccgcactgaaggtccctccctgcattagggcgcacaatggcactgacccttctcagagggatgcgaacgccggttgtagctagaaggaatgctggcttgttcttcaccacattgcagtctccgttgttgtcccgcttcacgatgagagcggagagcgcgcgggccgcaacgcccaagtcgattcagctggcgaccaaggaggcggcggagcacaaggcgcagggcttcggggcgggcatcgggatcgagacccat

SEQ ID NO: 43554 - DNA, 294 bp, Oryza sativa
  Clone ID: uC-osroM202039d03b1
aatcaatcctagccgctttccccatctcctcctcccagaactagaatttcgccaccccgaatcccttccatggtaggacttccgtttgattccgggtcgaatccgtcgcctccgatgccggaacggtgagggtttccctccctttatatggacaacacgcgtttgttttttttggcgcgcaggtttcagatcctggagggacttgcttctccttcggcggccatggaactatcggcggatgttgctgctgctgttcgtcctcatgttcagccagcgaaagctggcgtccacctg

SEQ ID NO: 43555 - DNA, 54 bp, Oryza sativa
  Clone ID: uC-osroM202039d06b1
gtggtgtaccggagggacggaggaggagggggaggggggaccattaaaaacacc

SEQ ID NO: 43556 - DNA, 187 bp, Oryza sativa
  Clone ID: uC-osroM202039d07b1
ttttgttacgtcctccaggcgagcgatccccaggtggccgtaattcgccgactggtggcctacacgacgcgctaccccgaggtacactcctctcctgccggagaagcgggcctaggcgaagagcagcgccacggcgaccgtttcggtgtcggattaagtctagagaggatcaaggaaagcaattaga

SEQ ID NO: 43557 - DNA, 512 bp, Oryza sativa
  Clone ID: uC-osroM202039d11b1
tctatatgcattcgcatccacgagaccactcgaacccgacccgcctcgccgccgccgccaccgaagtaatcccttaattggtcaaaatgtctcgggaggagaatgtctacatggccaagctggccgagcaggctgaaaggtatgaggagatggttgagtacatggagaaggttgcaaagactgtagatgtggaagagctcactgttgaggagcgcaacctcttgtctgttgcttacaagaatgtgattggtgcccgccgtgcctcctggcgtattgtctcatccattgaacagaaggaggagggtcgtggcaatgaggaacatgttactctgatcaaggagtaccgtggcaagattgaagctgagctgagcaagatttgcgatggtatcctgaagttgcttgactcacaccttgtgccctcatctactgctgcagaatctaaggtgttttaccttaagatgaaagggtgattaccacaggtaccttgcggaatttaagactggtgcccagag

SEQ ID NO: 43558 - DNA, 446 bp, Oryza sativa
  Clone ID: uC-osroM202039e02b1
ttttatttcatttgatagatcatctcgtaatgggcccaaggcttttgtcagtgaatatgctgtttggagaagtgatgcaggtagaggaagtctacttgcttcattggcagaggcagctttccttactggactggagaagaatagtgatgttgttcagatggcaagttatgcaccactcttcgtgaacaacaatgatcaaacgtggaacccagacgccattgtatttaactcctggcaacaatatggaactcctagttactggatgcagactcttttcggtgaatctagcggtgctatgtttcatccagttacaatcacttccagctactctggttctctggcagcatctgcaattacttggcaggattctgaaaatagcttcttaagagtaaagattataaactttgggtctgatccagtgagccttacgatctctgcaactgggc

SEQ ID NO: 43559 - DNA, 347 bp, Oryza sativa
  Clone ID: uC-osroM202039e03b1
gttttattagcaatggagagggctctgatgagcctcatgaggcggcgctccctcctccagagcggcggacgagcaccgccggcgatggccgccgccgccggtggctcaccattcttctccaccctgcagcaagcagccgccgcagacccggtccagtcgcctggcatcttgccagggctcaagatcagggactctgcgtcacagctgattgggaggacacccatggtttacctgaacaaggtcactgaaggatgtggggcccggattgctgctaagctcgagttcttgcagccgtccttcagcggcaaggacagaccagcaatttcaatgttggaagatgctgaaaa

SEQ ID NO: 43560 - DNA, 279 bp, Oryza sativa
  Clone ID: uC-osroM202039e04b1
cttttcttcattgatcaagttcagagagatgttgtccggaaatatgtggaaggtctttgctgggttatgagatactactatcaaggtgtttgctcatggcagtggttttatccataccattatgcaccttttgcatcagacctgaaatgcttggctgaattggagattacatttttcttgggctaacctttccagccatttgatcaactaatgggaacactaccagctgctagttccaatgcgttgccaaagtactatggggatctgtggaatgatcct

SEQ ID NO: 43561 - DNA, 329 bp, Oryza sativa
  Clone ID: uC-osroM202039e05b1
cctgatgtccacctccggagtacgacacatgcctaggggacttgtacagcgttgcttggatggaagacagcgatgtccacaacctgagaactgaatcactcaagcagcagtacaatctcgtcaaggaaaggacatctgtgcagcacacatattactctgggtcacatgtgatggaatacggttctttagagctgaatgcccatcatgtgttcatgtacatgggttccaatccggctaacgacaatgctacatttgtggaagataactcgttgccatcgttctcaagggctgctaatcagcgggatgctgacctgcattacttctggaaa

SEQ ID NO: 43562 - DNA, 389 bp, Oryza sativa
  Clone ID: uC-osroM202039e06b1
aataatttgaagccatccaccaacgaagaaaaaaaagggggagaaaaaaaaatccacgcacactttgcgtgcgaggcgaggcggttcgattctagaggagagagagagagagagagagagagagagatggacgccttctactcgacctcgtcggcgtacggagcggcggcgagcggctggggctactactcgctgaagaacttccgccagatctcccccgccgtccagtcccacctcaagctcgtttacctgacactatgcgtcgccctggctgcgtcggcggtgggcgcatacctgcacgtcgccttgaacatcggcgggatgttgactatgctcggatgcgtggggagcatcgactggttgttctcggtgcctgtctttgaggagag

SEQ ID NO: 43563 - DNA, 326 bp, Oryza sativa
  Clone ID: uC-osroM202039e08b1
cgaagaacgccatgtcgatgcttgcgtggagctcgctgttcgggtgcttgaccttgtaccacgtcggcggcggcaagaggaagaaaggcggcggcggcgggaagatggcgaagaagaaggtggtggtggcggctagccagaagcagcggaagctgcatagccggctgtcgttctccgacctgtcgttcggagggatggtgtcgccggaggacctgttgctgttgttggccggctcgaaccttctcgtcttgaccattgccgggcttcgtgccgtcaccagggactttttcatgaccatctttattggcgtgggcggctttggccct

SEQ ID NO: 43564 - DNA, 87 bp, Oryza sativa
  Clone ID: uC-osroM202039e09b1
tggtagttctagatcgcgagcggccgcccggcgtcatttatatacaccttggttttattacacccccaccaaccgagggagagggaa

SEQ ID NO: 43565 - DNA, 507 bp, Oryza sativa
  Clone ID: uC-osroM202039e11b1
tcgctttcatcatctcattgttcaagagttcaaacattatcgtcgtcatcatgggacgaggaaaatttgccagacacgcaccagagatgggagaacatctggactctggtctcttctaagtgaagctaacagtaaggctaaggtaacaactcccaagaggccaaagataagacaacagcaatcctgaaacaacatgagacccaaaaagaaacggtgcgggcgattcccaagcacaacgtacactggcagtcgttattcgtgatgtccgtcgaagatttcagcgctgctgccaatggtattatgttcttagaaccacttgaacagcagaccaccgtgtgtggcgaagaaaggcgcaaacacaagggactcgacggccatgagcttgatgaggatgttgagcgacgggcctgatgtgttcttgagggggtctcaatggtgtcaccgatcacggcggccttgtggcagtctgatcccttgggaccaagggtccgagcatgctcactggca

SEQ ID NO: 43566 - DNA, 504 bp, Oryza sativa
  Clone ID: uC-osroM202039e12b1
atttatcctggccttttctagaaccagtagatggtgtcattcttaccatacctgattattttgatattataaaaaatcctatggatcttggaactattaaacaaaatctggaatctggaagttatactactgtaaatcaatggattgcggatgttaggcttgtatggagtaatgccatgttatataatcctcctggaaatgaatttaacacaatggcaaaaactttatccgatacatttgagaaaaaacttgctcagatggttcataaactaagttattcctcttcacagaaaagagatcagctacgtagtactctagagacgttagtagcacaatataagaattatgagtcagaattgggaatgctcacaaaacaggcagaggatgaagctagagagcatcctgatttgtctccccccatcaaaccaagttctgcactactcaggtcacctttgaattttaatgagaagatgaaattatatcataatatcaactcgctggata

SEQ ID NO: 43567 - DNA, 451 bp, Oryza sativa
  Clone ID: uC-osroM202039f01b1
agtaattccaccgaacacatagcgagcaagaaggggaggaggaggagaagcgaaggagacaaggaaacagcgcgacatgccgggcatcccggcgtccagccctggcatccacgaccagcaccagcaccaggaccaccgggcgctagcaggcgtcggcatggcggtcgggtgcgcggcggaggcggccgtggccgcggcgggtgtcgcggggacgaggtgcggggcgcacgacggggaggtgcctatggaggtggcgcggcaccacgagcacgcggagccagggtcggggcggtgctgctccgcggtggtccagcacgtagcggcgccggcagcggaggtgtggtccgtggtgcggcggttcgaccagccccaggcgtacaagcggttcgtccgcagctgcgcgctgctcgccggggacggcggcgtgggcacgctccgcgaggtgcgcgtc

SEQ ID NO: 43568 - DNA, 354 bp, Oryza sativa
  Clone ID: uC-osroM202039f02b1
gtttgatatagatgggatagcaaactgcatgggggcctgagatgagaagcaggagtattctaaatgcagaagagtatccggtggaagtaggcatggagatcttatgctcaactgcgtttgtcagacaggacattgcagacagggtgaagaaccatggaaggtctgaagggatccatgcttagaagagcaaaacatggctactacgcatatccagacccagtggcgttgacacagaggaaactctaactatctaaaactgaagagagcagcactgacttatgaatgtgcttggagaataagggttgccagaagggagctgtgacagctcataatggctgcatgagatacacaagc

SEQ ID NO: 43569 - DNA, 251 bp, Oryza sativa
  Clone ID: uC-osroM202039f07b1
tctctccaccaccatcgcaagagagacgctggccttccgtctcctgacgcgcacacgccaccaacaccgcgacgcgacgcgacgcgagcgccaaacgtgagcgcggaaagaggagaggtgaggtgaggtgcgtggcccttggactttcgaggcgaaaccccgcgtgcgtgcgtatatgagatccacatccggggcccgccccagcagcggaggaggaggaggtgaccccgggaacaccttttactacttta

SEQ ID NO: 43570 - DNA, 457 bp, Oryza sativa
  Clone ID: uC-osroM202039f10b1
ttggtttgcgcagccgccgagcctgccgctctcgccgccgccggtgtcgccgtcgtcctacttcgccatcccgccggggctcagccccaccgagctgctcgactcccccgtcctcctcagctcctcccatatcttggcgtccccgaccaccggtgcaatcccggctcagaggtacgactggaaggccagcgccgatctcatcgcttctcagcaagatgacagccgcggcgacttctccttccacaccaactccgacgccatggccgcgcaaccggcctctttcccttccttcaaggagcaagagcagcaagtggtcgagtcgagcaaaacgttcgggcgccgccgcgtcgagcaacaagagcggcggcggcgggaacaacatgctggaggacgggtacaactggaggaagtacgggcagaagcaggtgaaggggagcgagaaccccaggagctacta

SEQ ID NO: 43571 - DNA, 491 bp, Oryza sativa
  Clone ID: uC-osroM202039f12b1
ttggtcacttcaaaactggatagttatgattgtaagggcaagaaagttttggagaagcctgtggatctcgagttatctttgaattttggaccctgtgaatctgctgtgacgaatgtggacttctctgcagcaaccaaacaacaggccgtatttctgcaatcatgcaatatgtcctcagtgcctacagtggacgaaggatcaacatctgctcgctggaaatctggtggtaagctacttccttatctgtatcagtccaggaacaacactggtcatttttcaagtaaagagttaccaggtagctccaaccagtctcaagatcttgccccactgccaaaaatgatacaaacgccacaaagtccagtaaccagtacttctggtgttgtcagctttcaacaacgctgcaacagcacaaaaatctgttcacaaccgggatgtgcaaaaggtgctagaggttcttcagggcgctgcattgcacatggtgggggtagaag

SEQ ID NO: 43572 - DNA, 526 bp, Oryza sativa
  Clone ID: uC-osroM202039g02b1
gcggcttgcttctctccccaaccctagctagctccgggtgcttccccggcggcgacatcgacgatggcggcggctgcggcaggcggcggcagcggcggcgccccgcgggcgctctcccagcgggagcaggacatacagatgatgctcgcggaggacgtgcacctcggcaccaagaactgcgacttacagatggagcgctacgattacaagcgcccatccgacggcattgtgatcattaaccttggcgaaacctgggagaagcttcagctggctgccagagtgattgttgccattgagaacccacaggacatcatcgtgcagtctgctaggccttatggtcagagggctgtcctcaagtttgcacagtacaccggagcttatgccattgctggcaggcacactcctggtacatttaccaaccaactgcaaaccttattcagtgagccacgtcttctcatccctactgaccccaggacagatcatcagccaatcaaggaggctgctcttggaaacatccccactattg

SEQ ID NO: 43573 - DNA, 506 bp, Oryza sativa
  Clone ID: uC-osroM202039g05b1
ctttacttctggtggttttgaggctggtatctccaaggatggccagacccgtgagcacgctcttcttgctttcactcttggagtgaagcagatgatctgctgctgcaacaagatggatgccaccactcccaagtactccaaggcccgttatgatgaaatcgtgaaggaagtctcatcctacctgaagaaggtcggctacaaccctgacaagattccctttgttcccatctctgggtttgagggtgacaacatgattgagaggtccaccaaccttgactggtacaagggccccaccttgcttgaggctcttgaccagatcaacgagcccaagaggccatcagacaagcccctacgtcttccccttaaggacgtgtacaagatcggcggtattggtaccgtgcctgtgggtcgtgttgagactggtgtcctcaagcctggtatgtgggtgacctttggtccagcggtctgaccactgaggtcaagtcggttgagatgcaccacgaggc

SEQ ID NO: 43574 - DNA, 322 bp, Oryza sativa
  Clone ID: uC-osroM202039g06b1
ctttatttcgagcggccgccctgttgttttctccatgggtggtttgacccgtgtgcacagcggcatcggctctgactgggggagcgagcctaagcactggactgcttggagaagacatttggtgcgctatcgcaagcactacaaaggcgttgatgaagagcctgctcaggcaggattacgctccgtgctggaggaaagatcccttcaccctaagatgcctttggttcttagcaataaattggaggaaaaggacaggacagtttggtagccctgcggtatttgattctatccccggaccttgattgagactgtagaccagttc

SEQ ID NO: 43575 - DNA, 246 bp, Oryza sativa
  Clone ID: uC-osroM202039g08b1
tttcctacgcgtccgaccccctctcttctctgtgtgtgtcccctctccccggggaaacgcggcggccgccgatcccgatcccccccaccgacgccgccgcccgatccgaccaaatccccactacgcgtcccaattccgggccaattggaccccccgagcgaccgccatctactcacctaccgatcgattcggagccccaatctagcgggcgcggggcggggcggtgaggcgggatcgggctagggt

SEQ ID NO: 43576 - DNA, 443 bp, Oryza sativa
  Clone ID: uC-osroM202039g09b1
ttgctgttcagaggaggacgaagcaacaggcggcggcggcagagcacggcgacctagcccgacctcgcaaccatggcaaggggtttgaagaagcatctgaagaggctcaatgcgcccaagcattggatgctcgacaagcttggtggagcttttgcccccaagccatcttctggtcctcacaagtccagggagtgcctgcctctgatcctcattatcaggaacaggctcaagtatgctctgacataccgggaggttatttctatcctcatgcagcgccatgtcttggttgatggcaaggtcaggactgacaagacctacccagctggtttcatggatgtcatttccatccccaagactggtgagaactacaggcttctgtacgacaccaagggacgtttccgccttcaatctgtcaaggatgaggatgctaagttcaagctttg

SEQ ID NO: 43577 - DNA, 501 bp, Oryza sativa
  Clone ID: uC-osroM202039g10b1
tttgttagcagaggaggacgaagcagcaggcggcggcggcagagcacggcgacctagcccgacctcgcaaccatggcaaggggtttgaagaagcatctgaagaggctcaatgcgcccaagcattggatgctcgacaagcttggtggagcttttgcccccaagccatcttctggtcctcacaagtccagggagtgcctgcctctgatcctcattatcaggaacaggctcaagtatgctctgacataccgtgaggttatttctatcctcatgcagcgccatgtcttggttgatggcaaggtcaggactgacaagacctacccagctggtttcatggatgtcatttccatccccaagactggtgagaactacaggcttctgtacgacaccaagggacgtttccgccttcagtctgtcaaggatgaggatgctaaggtcaagctttgcaaggctcggtctgcgcagtttggccagaagggaatcccctacctgaacacctatgat

SEQ ID NO: 43578 - DNA, 431 bp, Oryza sativa
  Clone ID: uC-osroM202039g12b1
ttggttttctcctcctcctctttcccttcctccgccgctccatcaaaaaatctccacaaggcttaagcagagggagggtgagggattagaaacaaacaacccttcggagaaaatcacgagaggcttcccgagggcaaagtctccgattcattcaggtccgactcgatcggcgatccgacgaagctcgagcaggtgagggagacggactcggactcggagcacggaaccggtatattagggaggctgaagagggagcttgagagggggtctagccttaagctcgaacgcgggtggttggttgtaccagcagcagcagggaatcatggactcggagcactggatctcgagcctcgccgccgcaagcggttctacgcggcgcagctcggtcacgtcgacgatatggcggggattggatggaggaggtggaagat

SEQ ID NO: 43579 - DNA, 514 bp, Oryza sativa
  Clone ID: uC-osroM202039h01b1
ggttaagacggcggcggggagcccgcggcggcgagggttttgattgatttgtcgccggcgacacgccgcccgccatggagagggagctgctggagacgttcgaggccgccaagaaggcggccgacgcggcggccggggcggacgactccccggaggccgaccgctgcctcgacgcgatgcggcggctgcgcggtctccgcgtcaccaccgacgtcctcgtctccacgcaggttggaaaacgtcttcgttaccttactaagcaccctcactcagacatacaatccatggctacagatcttctggggtactggaaaaaggttgttatcgaagaaggaaagaaaaatggtaccacagaaaatgttggatcaaccaactcagccgccagagctgaaaaggctcagcccatgaaggttgataagagttctgcatcaagaagtgtgaagcctgagaaaagagaagtcaatgttaggggccagaagcctgagagcataaggttgagaagatcaccaataat

SEQ ID NO: 43580 - DNA, 416 bp, Oryza sativa
  Clone ID: uC-osroM202039h02b1
cgttgattgaaaaaaaaaggcggacaagataaggggaggaatgcgaagaggttggagagagacgctcgtctccacgtcgccgtcatggccgcccgcgccgccgccgccgcgttcatgctgctgctcatcgtcggcgcggccaccgcggcgccggacatgtcgatcatctcctacaacgcggagcacggggcgcgggggctggaggaggggcccacggaggccgaggcgcgcgccgcgtacgacctctggctcgccgagaacggcggcggctcgcccaacgcgctcggcggcgagcacgagcgccggttcctcgtgttctgggacaacctcaagttcgtcgacgcccacaacgcccgcgccgacgagggcggggggttccgccttgggatgaaccgctttggcgatctcaccaacga

SEQ ID NO: 43581 - DNA, 498 bp, Oryza sativa
  Clone ID: uC-osroM202039h03b1
tcttccttccgtgcctacttcccccacccgcttggctggccgttgtcgccgccggcgaccgtcaagggaggggaggtccccggcgccatctcccagaaatggacgcctgtttttcaacacagcttattgatggagatggcgttctcaatgcttctggattggagaacttcatgaaggaagttaaaatgggcgaatgtgggctttcatatgctggtgtgtcaataatgggtccacaaagtagtggaaagagtacacttttaaatcaccttttccgcaccaatttcagggaaatggatgccttcaaaggaaggtcacagactaccaaaggtatatggatggcgaaggcccataatattgaaccatgcactcttgtaatggatttggaaggcactgatggtcaagagagggtagaggatgacacagcctttgaaaagcaaagtgcactggttgctttggctgttttagatattgggttgatcaatatgtggtgtcatgaca

SEQ ID NO: 43582 - DNA, 286 bp, Oryza sativa
  unsure (1)..(286): unsure at all n locations
  Clone ID: uC-osroM202039h04b1
nctccatctcacctcacctcagctcgcgagctccgctcttaccaaccgcagcgcgcgacgaaggggattggattgggttgggttggattgatctgagaatatatatttgctttagttaattttgattcataaccgaatagatgggactttaaggaccttctagatgtaccgattacgttactggatttaataagttccatggagtaattgagattcccaacgagaagattgagcgcattctatattcactttattgaaaaaagagggttgcctaaaggattaacac

SEQ ID NO: 43583 - DNA, 509 bp, Oryza sativa
  Clone ID: uC-osroM202039h06b1
attttaggcaccaaatccccccaccatggatcaccgcgtcctactcctcggcctcctgctcctctccccggcggtggccgccgcctcagtccccggcgaggaggagccgctgatccggcaggtggtcggcggcggcgacgacaacgagctggagctgaacgcggagcgccacttcgccagcttcgtccagaggttcgggaagtcctaccgtgacgccgacgagcacgcgtaccggctctccgtgttcaaggccaacctccgccgcgcgcgccgccaccagctgctcgacccctccgcggagcacggcgtcaccaagttctccgacctcaccccggccgagttccgccgggcctacctcggcctccgcacgtcgcgccgcgccttcctgcgggggctcggcgggtccgcccacgaggcgcccgtcctccccaccgacggcctccccgacgacttcgactggagagaccacggcgccgttggccccgtcaagaacagggatcgtgcgggtc

SEQ ID NO: 43584 - DNA, 486 bp, Oryza sativa
  Clone ID: uC-osroM202039h09b1
ttatttatagagaaaaaaagaaaaaaacgggagacgcggccatggcggggacggggagcttcaaggtgacgaggatctcggagggggcggtgaagccggcggcggcgacgccggaggagacgctgccgctggcgtgggtggaccggtacccgacccaccgcgggttggtggagtcgatgcacatcttccggtcgggcgccgacgcggccccgggcgtcatccgcgacgcgctcgccagggcgctgggcttcttctacccgctcgccgggcgcatcgtggagcccgaggccgggtcccccggcatccggtgcaccgccgacggcgtctacttcgccgaggccgccgcccactggaggctggaggacgttcgctttctggagcgcccccttcttcttcccaaggaggacctgggtccctaccccgccgaccaccgctggggcgtcgagccccacaacaccatcatgaagatgcagatcaccaaattca

SEQ ID NO: 43585 - DNA, 511 bp, Oryza sativa
  Clone ID: uC-osroM202039h10b1
ttgtttgagagctgaactgaagtcgccggcgccgccgtggagaagcgaagcccggcgatctacccgaccgtggagagggagcagctcgtcggggaggagagggggaggatgcattcgttcgggcaccgcgccaacgcggtggcgacgttcgcggtgaccatcctggccgccatgtgcttcgccgcctccttctccgaccacttcaactccccttcccccaccgcctctgtcaagatcttgaacataaactggtttcagaaggaagccaacggcaacgacgaggtcagcatgacgctgaacatttcggctgacctctcgtctctgttcacgtggaacacaaaacaggtctttgtttttgtcgcagctgaatatgagactccacaaaatgccttgaatcaagtttccctctgggatggcattataccatcaaaagagcacgccaagtttttgatccatacaacaaacaagtacagatttattgaccagggaagcaacctcataggaaaggatt

SEQ ID NO: 43586 - DNA, 510 bp, Oryza sativa
  Clone ID: uC-osroM202039h12b1
tttccgttttcttggagaggagaaatccgtaggctgagaggatttttggtagtcttgtttcgtgatattcgtgaagagggggggagctaaggggggattcgtaagatcagaattggatcacgcgggggcgcgctcgggatcgggggttccaaacacagcttcttcgttgaatttaagtggatgtactaatggagtcaaagggtggcaaaaagaagtctagcagtagtcgttccttgatgtatgaagctccccttggctacagcattgaggacgttcgacctgccggaggcgtgaagaagttccagtctgctgcttactccaactgcgcgaagaagccatcctgatagccctttcggcttctccatcctagtagtttaggatttcttgcaattccattttggcacttttcttctgacctatttctctggctgctgcttcctgataatcgaccagttctctagtcttgctccctgcactcctccctcctgcatctccggcacagtgttctga

SEQ ID NO: 43587 - DNA, 468 bp, Oryza sativa
  unsure (1)..(468): unsure at all n locations
  Clone ID: uC-osroM202040a05b1
cttattccccaaacccctcctcctcgccatggcggcgccgtcccagaccaccgccaccaccacccaccaccgtgtnctcctcccgtcccaccaccaccaccgagcggtgcctccctcgctcctccgcctcccgctccgcgccgcgcgccggggccgcctctccgccgccgccgcggccgcggcgcccgccgcgtcgaccgcggcgccgtcggagcccgccgcgggtgccgtaccggggaagccgacggtgctcgtggccgagaagctcggcgccgcggggctcgagctgctccgggggttcgccaacgtggactgctcctacggcctctcccccgaggagctccgcgccaagatcccgctctgcgacgcgctcatcgtgcggtcggtgaccaaggtggggcgcgacgtgttcgaggcatccgggggaaggcttcgcgtcgtggggcgcgccgtgtcgggatcgacaac

SEQ ID NO: 43588 - DNA, 87 bp, Oryza sativa
  Clone ID: uC-osroM202040a07b1
gtagctcacagttcagttctaccacgtacaacagcattatttgagagaggtatattattacaacggatgaggatgtgcttatctagc

SEQ ID NO: 43589 - DNA, 82 bp, Oryza sativa
  Clone ID: uC-osroM202040a08b1
tcaagagcgcgagcagctcgacatcaggcaggagggattttaaagagagatttcctttaagccacggggaagaagaaataag

SEQ ID NO: 43590 - DNA, 400 bp, Oryza sativa
  Clone ID: uC-osroM202040a10b1
tttctctcgatctccattcgtttttgagttcctcgtttgctccgcctctctttcactcatgggcaagattaagatcggaatcaatgggttcggccgcatcggcaggctggtggccagggtggcgctgcagagcgaggatgtcgagctcgttgccgtcaacgatcccttcatcaccaccgagtacatgacatacatgttcaagtatgacaccgtccacggccagtggaagcatcatgaggtcaaggtcaaggactccaagaccctcatctttggcacgaaagagttgccggtgttcggctgcaggaaccctgaggagatcccatgggctgcggctggtgctgaatacgttgttgagtctactgggggtttcaccggcaaggacaaggcagcagctcacttg

SEQ ID NO: 43591 - DNA, 416 bp, Oryza sativa
  unsure (1)..(416): unsure at all n locations
  Clone ID: uC-osroM202040b03b1
ctgttatttggggattttcggcccaatctcgcttgtggcagtcccctcccgccgcagcggcggttctcgataggcggaggcccctcccctgatctcgcgtggagcggaagggagatccatgatccatctagggaagtgttggagaattttaatcataaattgacatgtaaaggagaggaggcaagctatctgtaactgaaatagtttcggtgggataccatggttgacataaaccctgatcacatctttgaggttccggacacccctgaccgaatacagcagtcaacatgccctgtatctagcccagctgctaggagaggtattgcanaagcagctggaacttcattaccatcgcgaagaattaaatttaagatcacaaataactncatccagggtcaatcaagtagaggcaatgc

SEQ ID NO: 43592 - DNA, 478 bp, Oryza sativa
  Clone ID: uC-osroM202040b04b1
ctgttattcggggattttcggcccaatctcgcttgtggcagtaccctcccgccgcagcggcggttctcgataggcggaggcccctaccctgatctcgcgtggagcggaagggagatccatgatccatctagggaagtgttggagaattttaatcataaactgacatgtaaaggagaggaggcaagctatctgtaactgaaatagtttcggtgggataccatggttgacataaaccctgatcacatgtttgaggttccggacacccctgaccgaatacagcagtcaacatgccctgtatctagcccagctgctaggagaggtattgcaaaagcagctggaactccattaccatcgcgaagaatcaaatttaagatcacaaataactccatccagggtcaatcaagtagaggcaatgcaagtagtgcgtcgtctgcaccttagatgctgggatatttttaacaagccgagttgcacgatt

SEQ ID NO: 43593 - DNA, 535 bp, Oryza sativa
  unsure (1)..(535): unsure at all n locations
  Clone ID: uC-osroM202040b07b1
cttcgagttctctcactcgctataagtgggagcctctatcttatctccacttcttcttcagacttctcaaagaagaagagtcaggctcctcttcctcggcatcctcctcctgaattctccttctcggatcacctcttctcttcacctcctctctctcccatccgctgcaaccgccgcttacaaacgagagtttaattggtattttagtcttctgcacatccatcgagctcatcatcagattgaaacaaataaagtgaagtatttgatcacttatatggccctcaagacgctgcaagttccatctagctttgcaaggccgatcaaccgcagcttcatcggttcttcttcttcttcgtcgtcgtcgtctcagttttctctgcggccaaagcctgcatcggcacggctcgccgcaagtgtcgccggagagaggcgcctcgaatgcaggggcggcagcagcctgcacggctgcgtggacgaaggcgccgcggcggcgtcnaggaggcggcaggagcaggccgtgagatccccatcgtct

SEQ ID NO: 43594 - DNA, 452 bp, Oryza sativa
  unsure (1)..(452): unsure at all n locations
  Clone ID: uC-osroM202040b08b1
tgtttcttcttctgccattccatccatccaccgccgcctccgctctctcttcttcttcttcctaccctttgcctagttgcattcggagaggagaggactgattgattgattgatcgatcgatggccatcgaccacgagtcgccgttcaaggagctccgcctcaagaacaggaggatcatgggaggaggagggcctgagccggaggaggaggaggcggtggcgcacggagagcagtggccgcggtggctgagcccgctgctctcggccagcttcttctcgcagtgcaaggtgcacgccgactcgcaccggagcggcgagtgcaacatgttctggctcgactgcgccgccgacgccgacgccgccgncgccgcgctctgctccctctgcctcgcccacaaccaccgngaccaccacaccatncagatccggcggtcgtcgtaccacgacgtgat

SEQ ID NO: 43595 - DNA, 491 bp, Oryza sativa
  unsure (1)..(491): unsure at all n locations
  Clone ID: uC-osroM202040b09b1
tttctctcgatctccattcgtttttgagttcctcgtttgctccgcctctctttcactcatgggcaagattaagatcggaatcaatgggttcggccgcatcggcaggctggtggccagggtggcgctgcagagcgaggatgtcgagctcgttgccgtcaacgatcccttcatcaccaccgagtacatgacatacatgttcaagtatgacaccgtccacggccagtggaagcatcatgaggtcaaggtcaaggactccaagaccctcatctttggcacgaaagaggttgcggtgttcggctgcaggaaccctgaggagatcccatgggctgcggctggtgctgaatacgttgttgagtctactggtgttttcaccgacaaggacaaggcagcagctcacttgaagggtggtgccaagaaggtcgtcatttctgctcccagcanagacgcccccatgttcgttgttggtgtcaacgagaaggagtacaagtctg

SEQ ID NO: 43596 - DNA, 289 bp, Oryza sativa
  Clone ID: uC-osroM202040b11b1
tttctcgcggaggccgccgcaaccaaaaaaaaaaaagtctaaccctagatccaggccccgcgtctccggcgatctcccggccatggcgactcgccgggccctctcctccctcgtccgcgccgcctccaggctccgcggggcctcgcccgccccgcgcccgcgcgggccgctccaccgaccgtcgccatcggggtacctcttcaaccgcgccgccgcgtacgccacggccgccgcggcgaaggaggcggcgccttccgcgcccgcgacggggaaggcctcgggtggtggt

SEQ ID NO: 43597 - DNA, 422 bp, Oryza sativa
  Clone ID: uC-osroM202040b12b1
ccttgtcacctttggcggcctcggcttgcttaaaaggatacatatgcttttgtaactagaacatttgttgttgaatttggattatttgatcccatggcgaattctcgggctagccgtttcaagatgtctaatctatcagagccctcaaaagaagctgcatcagctgatgattcaagtgctgtccagaaaactggagcatggagtaacacgttgaacattcttctgcaacaagcttcagtctatggtgtggctgctggttattgcctgtcagcatccctgctctccattatcaacaaatgggcagtcatgaaatttccataccctggagcattgacagctttacagtacttcactagtgttggtgggagttctcttatgtggacaactaaagcttattgagcatgatggccttaatttgagga

SEQ ID NO: 43598 - DNA, 548 bp, Oryza sativa
  Clone ID: uC-osroM202040c01b1
ctcgttggctagagcgcgagagccagtagccgcagctgcagcaagcagcagcagcagcgaagagcctgagccccagaggaggcgtgcaccgcctccgattggccggcctctcggagagagagagagagagagatcgatcgagtcctattggccgccgcctccgcgccctggctgctcactggtgagcgagcatggagtcgaggccggggggaaccaacctcgtggagccgagggggcagggcgcgctgccgtccggcataccgatccagcagccgtggtggacgacctccgccggggtcggggcggtgtcgcccgccgtcgtggcgccggggagcggtgcggggatcagcctgtcgggcagggatggcggcggcgacgacgcggcagaggagagcagcgatgactcacgaagatcaggggagaccaaaggtattgttccttttcctttttggagtggttgtaggtgctcggcccggttttatctctgcaattcgtgcttggtttgggaacaaattgtgcttgagttgaaaaaggagactaattcagat

SEQ ID NO: 43599 - DNA, 500 bp, Oryza sativa
  Clone ID: uC-osroM202040c02b1
gtagcgtcgcgctacgaggtggaggtgacggtggcctcggcgcgcgacctcaagaacgtcaactggcgcaacggcgacctcaagccctacgccgtcgtgtggatcgacgacggcgccaagtgctccacccgcgtcgacctcgacaacgccgacaaccccacctgggatgacaagctcaccgtccctctcccgccctccacccgcctcgacgacgccgtcctctacctcgacgtcgtccacgccaacgccaccgacggcgtcaagcccctcgtcggctccgcgcgcctcccgctccgcgacgtcctcgccgacaccggcataggcgcccgagcctcccgctccctccgcctcaagcgcccctccggccgcccccatggacgcctcgaagtccgcgtcgccgtccgcgagcccaagcgctactacgacccctcgccggcgtaccctgctccctaccaccagcagtcgtcccgtgacccctacgcctacggtaacactacaac

SEQ ID NO: 43600 - DNA, 539 bp, Oryza sativa
  unsure (1)..(539): unsure at all n locations
  Clone ID: uC-osroM202040c03b1
ctcgtacattttcagctagccacaagcaacacaagtccaagacaagtcaagcgttcgcaccaagtcaaaccgcgcctcactgccaccttcgtttgcgcaccatggagcttgccctggttggcaacccttcgaatggcgtggcgaagccgtcgtgcaactccgtcggctcgctgcccgtcgtcagctccaacgccgtcatcaacccgccggtgaccagcgcggcgggcgccacgctcggcaggcacctcgcgaggcgcctcgtgcagatcggcgccaccgacgtgttcgccgtccccggggacttcaacctcaccctgctcgactacctcatcgccgagcccgggctcaagctcatcggctgctgcaatgagctcaacgccgggtacgcggccgacggctacgcccgcgcccgcggcgtcggcgcctgcgccgtcacgttcaccgtcggtggcctcagcgtgctcaacgctatcgccggcgcctacagcgagaacctncccgtgatctgcatcgtcggcgggcccaactccaacgactac

SEQ ID NO: 43601 - DNA, 498 bp, Oryza sativa
  Clone ID: uC-osroM202040c05b1
ctcgtcttccttgcttttatcgccggcgacgtcgccgtcggctccggcggcgccgaggagtaggagtagtaggaggaggaagccggtagccggaggaggagcgatgagatggatgacgcgaagcagcagcagtagcagctgacggggggggtcgacactggggtttggaagacggtgaatcctttggtcaacggaggtgcctctgggatgctcgccatctgtgtcatacatcccatggacatggtcaaggtgaagatccaactgggagagggatctgcagctcaggtcacaaagaacatgcttgctaatgagggtattgattccttttacaagggttagtgagctggtttactaaggcaagagacatatactactgctcgtctaggatacttaaggtgtctgacaaacaaagcaattgaaaagaatgatggaaagccattgcctttagttcagaaagcttttattggccttactgctggagctatttgagcatgtgtt

SEQ ID NO: 43602 - DNA, 544 bp, Oryza sativa
  Clone ID: uC-osroM202040c08b1
tctttaggatcttgggccatgaagctggaggcattgtggagagtgtgggagagggtgtgaccgaactcgcgccgggcgaccatgtcctcccggtgttcaccggcgagtgcaaggagtgtgatcactgcaaatcggaggagagcaacatgtgtgacctcctcaggatcaacgtcgaccgcggcgtcatgatcggcgacggcaagtcccgattcaccatcaaggggaagcccatcttccactttgttggcacatccaccttcagcgagtacaccgtcatccatgtcggctgcctcgcgaagatcaacccggaggcgcctctcgacaaggtctgcattctcagctgcggtttctctaccggttttggtgcaacagtgaatgtcgcgaaaccgaaaaagggccagaccgtggctattttcggtcttggagctgttggtcttgctgctatggaaggtgccaggctgtctggagcatcgaggatcattggtgtggacctgaaccctgcgaaattcgaacaagctaagaagtttggctgcactgactttgt

SEQ ID NO: 43603 - DNA, 514 bp, Oryza sativa
  Clone ID: uC-osroM202040c10b1
tctaaaccatcgcttcccctcctctctcgctctcgccggagttagatgcgcgtgagctcgtgtaggagagcgggagcgagcactaccgggtgagactccggcggcggcggcggccgcgatggcgtccatctccggcgcggcggcgcctccgtcctcgtcggcggcgtgcaggctgcggctgcggcggcagctcctcctccgcccctcccacctccgcctccgcgccccccactccatcgcggacctctcccgctcctcctcgtcctcgtcggagcagcagccctcctctaccccggcggcgccgctcgcctccaggccggggcagaacggcagcacccgcggcgcggtggagaaggacccgatcaagctgtgggagaggtacgtggagtggctgtaccagcacaaggagctcggcctgttcgtggacgtgagccggatggggttcacggaggagttcctccgccggatggagccgcggatgcagcgcgccttcgcggcgatgcgggagctcgag

SEQ ID NO: 43604 - DNA, 517 bp, Oryza sativa
  Clone ID: uC-osroM202040c11b1
ttttaaaatccaatcttttcctcctccgctgttgacagtccaatgtctagcttcactcacttcatctcgcttccgttgggtatccacccacaacttgttgataagctgaatgaattcaagaggtcaatcctgacttctaatgaatataaagctgcaggtttccgcatcgacgagtcaatatttgctattcccgaatcacttcacctaacggttcttatgttggagctaaagggtgagaacattgctaaggcttccagtgtgctccagtcagtatcggacaaactaatggaagccttgaaaaacagacctaatctcatacaggttaagaggtctggcatgcatgaaaggcttaccagaataggcctgggtagtatatgctcctgtgttggaagttggtgaacagggacgcctacaacaagtttgcgacattataattgatgcctttaccagctcaaacctagcacctacaagtgatgagaagcgagaactgaagttgcacgctaccgtgatgaatgca

SEQ ID NO: 43605 - DNA, 549 bp, Oryza sativa
  Clone ID: uC-osroM202040d04b1
gtataatcaatgcagcgttctacccatgcttttctttctgtacttcctgcctaaactttgcctataaatctgcacatccatggctcgtttcttgcaacaaagccacagccttcatcatcatcagagagagaaggagagagaggaagagattgcagtgagtgagtgagtgagtgaagcagccatggcggcggcggcgagggcaacggcgcgggtcgggcttgcgctgctgctcgcggtggtgggcgtcggcgcgcaggactacgacttcttcttcctggtgctgcagtggcccgggtcgtactgcgacacgaagcagagctgctgctacccgcgctccggcaagccggcggccgacttcggcatccacggcctctggcccaaccgcgacgacggcagctacccgcagaactgcgaccctgacagcgagttcgacccctccaaggtgagcgacctgctggggagcatgcgctcggagtggccgacgctggcgtgcccgagcaacgacggcatccggttctgggcgcacgagtgggagaagcacggcacctg

SEQ ID NO: 43606 - DNA, 567 bp, Oryza sativa
  unsure (1)..(567): unsure at all n locations
  Clone ID: uC-osroM202040d05b1
gaaaaacaccggaggaatattccccacctcgcctctctccagccaccgacatggccgccgccgccgccgccgccgcttccgcctcctcctcgtcgtcgtcgtcctcctcggccgaatccgtccccctccccaccacgactctccccatcgacaaggcggcggctgtaggcggcggtggcgaccgggcggtggattgcggggtgtgcgcgatttgcctggataagatcgccctgcaggagacggccctcgtcaagggatgcgaccacgcctactgtgtgacgtgcattctgaggtgggcgtcctacaaacagacgcctcaatgcccacagtgcaaacatccgtttgatttcctcagcgtgcaccgctctctcgatggctgtattcatgactacatgttcgaggaaagcgtttgccttctcctgagggccacttggttggaacctctgatcgtagaggctcacgaagaggctctggatgaagaagagttataccacatctatcaatatgatgatggcgttgaagatgaccttgacgaggaagctattacatgagcaggtctncgagcat

SEQ ID NO: 43607 - DNA, 458 bp, Oryza sativa
  unsure (1)..(458): unsure at all n locations
  Clone ID: uC-osroM202040d06b1
ttcttcttctccttagttgatttcatcttcagttgcttgagcttaattacagactgagagaagatgtcttgcagctgtggatctagctgcagctgcggctcaaactgctcctgcggaaagaagtaccctgacctggaagagaagagcagcagcaccaaggccaccgtcgtgctgggtgtggcgccggagaagaaggcgcagcagtttgaggcggccgcagagtccggcgagaccgcccatggctgcagctgcggttccagctgcaggtgcaacccttgcaactgttaagatgcctgcctgcatctaccatctatgtgaattgtgatgcagaaaaataaagaagcttggccatttgggttggtgcttgaccaatatatatggtgtgtgtgtgtgtgtgtgatgggnttatnnnatgtgctatgttattggtttcactattcacgtactatgcttgtaat

SEQ ID NO: 43608 - DNA, 548 bp, Oryza sativa
  Clone ID: uC-osroM202040d07b1
tttgggtttaagatgcactgccgtggctggcgatccatctactgcatgccgataagacccgcgttcaagggatcagcgccaatcaacctttctgatcgtctccaccaggttctccggtgggctctcggttccgttgagatcttcctcagccggcactgcccactctggtacggctacggtggtggtcgtctgaaatggctccagagattgtcctacatcaacaccatcgtctacccgttcacctctcttcctcttattgcatactgttgcctgcccgccatttgcctgctcacaggcaaattcatcattcccacgctctccaacgctgcaaccatatggtttcttggcctcttcatctccatcatcgtgacgagcgtcctggagctgcggcggagtggcatcggcatcgaggactggtggcgcaacgagcagttctgggtcatcggtggcgtctccgcccacctcttcgccgtgttcagggtattctcaagatgattgctgggctggacaccaacttcaccgtacggccaaggcgaccgacgacaccg

SEQ ID NO: 43609 - DNA, 457 bp, Oryza sativa
  Clone ID: uC-osroM202040d08b1
tttttgtagccaccttctccccaagcacacactctcctgccaaaccctagcaccagctagctctctcactctactccaatggcgcgcttccagatcgtggccttggccatggcgatgctcttcgccgccgcatcagctcaggccccggcggtcaccccgacgcccgctcccaaggcgtcccctcctccggcgacgccgacgacgacgcctgcgccggtgtcagcgcccccggctcaggccccggccactcctcccccgggtccggctcccgcccccaaggcctcagctccggcttccgcccccaaggcctaggctccggctcccgagcccgcggccgcggctcccaccccggagatcagctcgccaccaggcccgtcaccggtaggcttggccccgtctcccaccgccgaggagaccccttcacccagcgccgccgccggcgtctgcttcgacgacg

SEQ ID NO: 43610 - DNA, 498 bp, Oryza sativa
  Clone ID: uC-osroM202040d09b1
ttttctggggaagcaggagaggtagttagattgcattagctagctgtagaaagctagccatggttagtaggaagagaggaggaggaggaggcgtggcaatggcggtggcgatgctgctggcggcggcgagcgcgtcgcggccgtcgtcgtcgctggaagggttccagccgctgtcgaagatcgccgtccacaaggccaccgtcgacctccacggctccgcgttcgtcagcgccacgccggcgttgctcggcgaccagggagaagacacagagtgggtcacggtgaaatacggctgggcaaacccttccgctgacgactggattgctgtcttctctccggccgatttcatctcgggttcttgccctaatccttccagatacccggatgagccgctgctctgcactgcaccaataaagtatcaattcgcaaactactcggcgaactacgtgtactggggcaagggcagcatccggttccagctcatcaaccagcgctacg

SEQ ID NO: 43611 - DNA, 550 bp, Oryza sativa
  unsure (1)..(550): unsure at all n locations
  Clone ID: uC-osroM202040d10b1
gcagatccaaaccaactcttaccgtcgacgaggaagaaggcggcggcggcggcggaggcgaaggcggcgaagatgcagtacaagaacctggggaggtcggggctgcgggtgagccagctgtcgtacggggcgtgggtgacgttcggcaaccagctggacgtgaaggaggcgaaggcgctgctccaggcgtgccgcgacgccggcgtgaacttcttcgacaacgccgaggtgtacgcgaacgggcgcgccgaggagatcatggggcaggcgatgcgggacctcgggtggcgccgctccgacgtcgtcgtctccaccaagctcttctggggagggcagggccccaacgacaagggcctctcccggaagcacatcgtcgagggcctccgcggctcgctcaagcgcctcgacatggactacgtcgacgtcgtttactgtcaccgncccgacgccaccacccccgtcgaggagaccgtgcgcgccatgaactgggtcatcgaccacggcatggccttctactggggcaccttcgagtggntccgccagcagatca

SEQ ID NO: 43612 - DNA, 539 bp, Oryza sativa
  unsure (1)..(539): unsure at all n locations
  Clone ID: uC-osroM202040e02b1
ctctctacccccaaacttgccctccaatctatctccgccgccgccgccgcctccgccgcgagagggcgtcgccgagctgcgcgggaggctcgcctcccgcagcatctggccggattcgtcgtagtcgaggcagctgtaagcgagagagagggagatggccgcggccgccgggaaggcggcgatggagcggcaccagtcgatcgacgcgcagctgcggctgctcgcgccggggaaggtatccgaggacgacaagctcgtcgagtacgacgccctcctcgtcgaccgcttcctcgacatcctccaggacctgcacggccctcacctccgcgaattcgtgcaggagtgctacgagctgtcggcggagtacgagaacgacagggacgaggcgcggctcgacgagcttgggaggaagcttaccagcctgccgccggggactccatcgtcgtctccagctccttctcgcacatgctcaacctcgccaacctcgncgaggaggtgcagatcgcgcaccgccgccgatcaagctcaagcgcggggac

SEQ ID NO: 43613 - DNA, 551 bp, Oryza sativa
  Clone ID: uC-osroM202040e05b1
gtcgtcgccgtcgaagccgatctcctgcgcgcggagcggatcgcctctgtcagtcaccagctatacagtatgagttcactggagagtgcaagagcagatcttgctctgcttattttatacctaaacaaggctgaagcaagagataagatctgtagagctatacaatatggctcgaaatttgtgagtaatggacaaccagggcctgcacagaatgttgacaagtcgactagtctagctcgtaaagttttccgactttttaagtttgttaatgatctgcatgctttgattagtcctcctgccaaaggaactccactacccctgatcttacttggaaagtcgaagaatgcactgctatcaactttcctctttctggaccaaattgtatgggctggaaggacaggaatatacaagaacaaggagcgagcagaattcctcagcaagatagcattttattgcttcctgggttctaacacatgtactagtattattgaggtagccgagcttcagcggctatccaagtcgatgaagaaactagagaaggagcttaaaca

SEQ ID NO: 43614 - DNA, 499 bp, Oryza sativa
  Clone ID: uC-osroM202040e07b1
atcgatcgagttatcaagagataattaatatcgtttcggtttagtgcgcgtgatccagcagcagcaatggcaggcaaggcctcgatcgcgctattcctcgccgtcaacctggtggtcttctcgttgggcagcgcctgcggcggccactgcccgacgccgacgccgccgaccccgtcgacgcccaccccgactcccgccgcattcggcaagtgcccacgcgacgcgctgaagctgggcgtgtgcgccaacgtgctgggcctcatcaaggccaaggtgggcgtgccgccggcggagccgtgctgcccgctgctggaggggctcgtcgacctcgaggcggcggtgtgcctctgcacggccatcaagggcaacattctcggcatcaaccttaacctccccgtctacctcagcctcattctcaactactgcggcaagcgcgtgcccaccggcttcaagtgcttctaaaggctttataaagtagccgcgcgatcgattcatgcac

SEQ ID NO: 43615 - DNA, 557 bp, Oryza sativa
  Clone ID: uC-osroM202040e08b1
tctttctgcgcaaggagcaggacgaggtggtcaccgagatcaacaagatgcacaagaagatcctctcctctccagagatggttgataaacaggttgatgctacgttgattcggcttcgtgctttatatacacgtgccaaagaactttgtgagagtgaagtcagtgcatcgtctgctttggttggactattggatggtttgttgcaatctggaacttcagctgcacaacgaaaaaagatagttggtgagcagaaaaagaagaggatgaagtctgatacagatactacacgattctcctctgcatctatgaggagccaacttgaccaagctacaaacctgaaaggagaacaggttgcagctaaggtcaaatcagacgaagaaaaagatgaatggtttgtggtgaaggtgatacatttcgataaggaaacaaaagaatatgaggtacttgatgaggagccaggtgacgatgaagagagtgcccaaaagatgtacaagttgcctatgtcagatattattccattttcaaagagaggggatccttccagtgccccagatttt

SEQ ID NO: 43616 - DNA, 505 bp, Oryza sativa
  Clone ID: uC-osroM202040e10b1
ccccaactcggcgtcgcgccgcctcaaccgaagcaaggagcaaagcggggattcagaacgggaaggagaaggtccggttcgtccgctctcgagctcaagtgtcagttgaagtgttttgaaagtcatggcggagcatttggcttcaatatttgggactgagaaggatagggttaactgccccttttacttcaagattggggcttgccgtcatggggatcgttgctcccgtctgcacaacaggccaactgtgtcgccgacaattgtgcttgctaacatgtatcagcgccctgatatgatcacaccaggagtcgatgctcaaggccaacctattgatcctgaaaagatgcaggagcactttgaggatttctatgaggatatctatgaggagctgagcaagtttggtgaggttgagaccctcaatgtctgtgataaccttgctgaccacatgataggcaatgtgtatgtccagtttagggaggaaagacaggcagtcgctgcgcataat

SEQ ID NO: 43617 - DNA, 557 bp, Oryza sativa
  unsure (1)..(557): unsure at all n locations
  Clone ID: uC-osroM202040f01b1
cgccgctgctcgcttccttttcctctcccacgaaagatggcgtctcacattgttgggtacccccgcatgggccccaagagggagctcaagtttgccctggagtctttctgggatgggaagagcagcgctgaggatttggagaaggttgcgaccgacctcagggccagcatctggaagcaaatggctgacgctgggatcaagtacatccccagcaacaccttctcgtactatgatcaggttcttgacacggctgccatgcttggtgctgtcccagagcgctactcatggactggtggagagattgggttcagcacctacttctcgatggctaggggcaatgccactgtccctgccatggagatgaccaagtggtttgacaccaactaccactttatcgtccctgaacttggtcccaacaccaagttctcctactcttcccacanggctgtgaatgaatacaaggaggctaaggcgctcggcgttgacaccgtgccagtacttgntggaccagtttcatacttgttgctctccaaaccttgccagggtgtagagaagtc

SEQ ID NO: 43618 - DNA, 566 bp, Oryza sativa
  unsure (1)..(566): unsure at all n locations
  Clone ID: uC-osroM202040f03b1
gtctcgtcgtcgtcaccgccgccggctcaccccccacccgtcgccgccggcgcggaggccaagccctagccccagcgcggccgatcgcctcgatcccccggcgagccgatgggcgtgcgccgctgaagcatgccagcgcgccgaggccgtggaaagcggaagcagcagcagccgccgccgccgccgacgggcccagcggacgcgaggcagccggaggggaagcagcgggaggaggagcggaaggggatggaagggtccgacaaggggggcgccggcgacgacgggagccccgcgccgctcccggagacggtacaaatcggaaattcaccaacgtataagcttgagaggaagcttggaaagggaggatttggacaagtatacgttggccggcgtatttcctctcctactcatggtaacagaaattctggtgcaaatgcattagaggttgcgctaaaattcgaacatcgaaccagcaaaggttgcagctatggagctccctatgaatggcaagtctacaatactcttagtggaaatcatggtgtnccacgggtacactacaaaggaaa

SEQ ID NO: 43619 - DNA, 550 bp, Oryza sativa
  unsure (1)..(550): unsure at all n locations
  Clone ID: uC-osroM202040f04b1
gtcatagatggtgacaaaaatgtctgagaaagtggcaactggaatactatccggagttgtaaaggttactggctattttacaaactcaatagctaactcaaaagctggcaagaagttctttaatttgttacctggagagattgttcttgcttcgcttgatggattcggtatgattctttaacttttctattgtatctggttagtgttacataatgggtctgcttggcattattgttttttttaatggtataatgagtgttgatatgtttgctttattcagacatgaaacctggtttcataatttaataaatttatgttattcttaaactcacctagacaacacctgtgtcatgactcatgagcagattggtttttctgtttctaatntgaatatccctgtgggttgcattatataagtcataattatctgacgtaggtcaggctttgcttgggtttttttggtcgcatatattctgtgaatttgcataacttgatggatacaaaattttgccaaatctgaggtagcataagaagcatatactttggtgac

SEQ ID NO: 43620 - DNA, 526 bp, Oryza sativa
  Clone ID: uC-osroM202040f06b1
gtttccccaattcggaggccaagcctgcaccggcaagcggcggcggcggcggcgacgaggcgagagggttcccttccgcggagccggcggagatggaggccacggcgaagtacaaccggggcaacccggcggtgaagcggatccttcaggaggtcaaggagatgcagtccaacccgtccccggacttcatggccatgcccctcgaggaggacatcttcgagtggcaatttgcgatcctggggccacgagacagtgagtttgagggaggaatctaccatggaaggatccagctgccatcggactatccgtttaagccaccatcattcatgctgctcacgccaagtggaagatttgagattcaaaagaagatttgtttgagcatatccaattaccaccctgagcactggcaaccatcatggagtgtgcgcacagctcttgtagctttgattgcattcatgccaacaccaggtggtggggcattgggttcgttggacttcaaaaggaagatagacgggcactagctatc

SEQ ID NO: 43621 - DNA, 517 bp, Oryza sativa
  Clone ID: uC-osroM202040f07b1
atctgcgcaaggagcaggacgaggtggtcaccgagatcaacaagatgcacaagaagatcctctcctctccagagatggttgataaacaggttgatgctacgttgattcggcttcgtgctttatatacacgtgccaaagaactttgcgagagtgaagtcagtgcatcgtctgctttggttggactattggatggattgttgcaatctggaacttcagctgcacaacgaaaaaagatagttggtgagcagaaaaagaagaggatgaagtctgatacagatactacacgattctcctgtgcatctatgaggagccaacttgaccaagctacaaacctgaaaggagaacaggttgcagctaaggtcaaatcagacgaagaaaaagacgaatggtttgtggtgacggtgatacatttggataaggaaacaaaagaatatgaggtacttgatgaggagccaggtgaccatgaagagagtgcccaaacgacgtacaagttgcctatgtcagatattattccatt

SEQ ID NO: 43622 - DNA, 501 bp, Oryza sativa
  Clone ID: uC-osroM202040f08b1
tatcatctccagctgatcaagagctcttaattagctagctagtgattagctgcgcttgtgatcgatcgatctcgggtacgtagcaatggcgtccaaggcgttcgctctgttcctggccgtgaacctcgtcgtgctcggggtggcaagcgcctgcggcggcagcccgtcgtgcccgacgccgacgccgtcgaccccgacaccgtcaacgccgacgccgacgccgtcggcgttcgggaggtgcccccgcgacgcgctgaagctgggcgtgtgcgccaacgtgctgggcctgatcaaggccaaggtgggcgtgcctccggcggagccgtgctgcccgctgctggaggggctcgtcgacctcgaggcggcggtgtgcctctgcacggccatcaggggcaacatcctcggaatcaacctcaacctccccatcgacctcagccttatccttaactactggggcaagaccgtccccaccggcttcaagtgctaagcagcgtgcatatg

SEQ ID NO: 43623 - DNA, 480 bp, Oryza sativa
  Clone ID: uC-osroM202040f09b1
tttgcatttgttagtgaatatgcggtgactggaaatgatgctggccgaggaacattagtagctgctctagcagaagctgcatttctcattggattagaaagaaacaggtcttttgcctcttttatggcatttctagggcctgttcactttgatgccattttcaaccttaccaaaatttggtaaagttgccaataaagtggctacatttagtttgctgccaaattttggtaaatatataagaaatcctgccagttgccaaaattttggtaactatgccaaaatttggtaaggttttttttggcatcaaagcgaacaggccctagttttggcacctgggtgatacttgcttttattggaagcttacttgttttgcgagctgtttctgtgcagtgatgtggtcgagatggcaagttgtgctccactcttcataaatgacaacgatcgcgggtttagtccagatgccatagtcttcaactcatg

SEQ ID NO: 43624 - DNA, 562 bp, Oryza sativa
  Clone ID: uC-osroM202040f10b1
tcctgcgccgcctcatcttatctcgccaatcccccttcgtcgcgcgcaaggctaaaccctagctcctccgcggctccgcccccaccgcctaaaccctgctccgcccccaccgcctaaaccctagttcggaggtagccttcgcggtcctcctctcctgtttggctcatcgattctacggttcgattgagttgcgtgcgggcgtggtgcgggaggatggccgagccctccaaggtgatccacatccggaacgtcgggcatgagatctccgagagcgaactgctccaggtggtgcagccgttcggcactgtcgccaagctcgtcatgctgcgtgctaagaaccaggctctcgtccagatggaggatttagcttctgctgtgaatgtgatccaatactacaatacaattcaacccagtgtaaggggaagaaatgtttacttgcaatattcatcccaccaagaattgactactgatcagagctctcatggacgaaatcctgatcaggaagaacctaaccgaattctgttagtaaccattcatcatatgctttaccctataaaccatg

SEQ ID NO: 43625 - DNA, 338 bp, Oryza sativa
  unsure (1)..(338): unsure at all n locations
  Clone ID: uC-osroM202040f12b1
tcncctcctcctccgccatggtggagactcggcggagtttaaacgccactaccccttaaaacacccacataacaaaaaataaataataaaactaacataaacataaacaatataaacaataaaaaaaattacaacacaactccaccaaaaataataaaaacaacaaaacataaataacacaaaacaatcaaacaatcaaacaaaaacataaataaaaaaaacactaaaaaaaataaaaaaaaaaaaacaaaaaaatcacaacatacaaaaacaaataaaaaataactaaaaaaaaatatacacaataaacacaaataaaaataacaaaaaaaaaaaca

SEQ ID NO: 43626 - DNA, 523 bp, Oryza sativa
  Clone ID: uC-osroM202040g01b1
aaggaagcagggcaactttgcgggtgcagtggaggagtacagcagagccctcagcctgacacccagccacttcaaggcgctgttcaaccgcggcttctcgtatgacaagctgggcaagtatgacttggccatccaggactacaccaaggccctggaggttgaccctgccaacagctttgcatactacaaccgcggtatcaccaaggaccgcatgggtgactttgagggggcagtggcagacttctcgtcagccatctcgctggaccccggcaacgccgacttctatcacaaccgcggcttctcgctgcgcaagcagggccgctttgagtcagccatccgggactacacgcaggccattcagctcaacccaggtcactgccgcgcctactacaaccgcgccttcagccacgaccgcttggggcagtttgaggatgcagttgcagactacagcaaggccctgcagatagagccggcgaatgccacagcactgcacaacaggggcagcttgtttgagcggatgggc

SEQ ID NO: 43627 - DNA, 521 bp, Oryza sativa
  Clone ID: uC-osroM202040g03b1
gcgtcctccgttgacaacatcgatgctcctgctttgggttcttctttgcacgaattccgccaccgccgacgtcgccggcagcaatggcggctgcggcggctttaagcgcatgttcagcttcggcgactccatcaccgacgccggcaaccttgcgaccatcagccctcccgacgccttcttgaacatgctccggtacggcgagaccttcttcggccaccccaccggccgcttctgcgacggcaggctcatcgtcgacttcctagcggatgatctggggctgccgttcctgacgccgttcctccgggcgaagtcgccggaggacttccggcagggggccaacttcgcggtggccggagcgacggcgctgagccaggactttttcaagcagatggggctcaacctcaccatcatacctccattctcgctggacgtgcagctcgagtggtttaagagcgtgcttaattctcttggctctcagaccaagaacgcatagaaattatgtctaaatccctatttctaat

SEQ ID NO: 43628 - DNA, 269 bp, Oryza sativa
  Clone ID: uC-osroM202040g04b1
cttccaccttctcccttctcctcgctcttccccctccgccgccgccgcagcggagcagcaacagcaggcgagcgacatgggagggtttgtcaagacccagaagacccatgcctacttcaagcgtttccaagtcaagttcaagagacggaggcagggcaagactgactacagggccaggattaggctcaccaaccaagataagaccaggtccaacacaccgaagtaccgttttgttgtgagattaacaaacaaagatatcacagttaaaa

SEQ ID NO: 43629 - DNA, 524 bp, Oryza sativa
  Clone ID: uC-osroM202040g05b1
ctcattttccgcttgcatcttgctcattcagatctcttctgctttgagcaatggccaacctcaccgacctcgttaacctcaacctcagcgactgcagcgacaagatcatcgccgagtacatctgggttggaggatcgggcatagacctcaggagcaaagcgaggactgtgaaaggccccatcaccgatgtgagccagctgccgaagtggaactacgacggctccagcaccgggcaggctcccggcgaggacagcgaagtgatcctctaccctcaagccattttcaaggacccgttcaggaggggcgacaacatccttgtgatgtgcgactgctacacgccacaaggtgagccaatccccactaacaagaggcacagtgccgccaagatcttcagccaccctgatgttgttgctgaggtgccatggtacggtattgagcaggagtacacactccttcaaaggatgtgaactggccccttggctggccagttggtggctttcctggcccacagggaccatactact

SEQ ID NO: 43630 - DNA, 571 bp, Oryza sativa
  unsure (1)..(571): unsure at all n locations
  Clone ID: uC-osroM202040g09b1
acacaagctaccccaactccggccatggcgcgccagcacttcctcgtcgtcgcgtaccctggccagggccacatcaacccggcccgagccctcgccgcgcgcctcgcccgcgccaccggcgcgcacgtcaccctgtccgtcgccgtgtcggcgcaccggcgcatgttcccgtccctcgccgcccccgacgaggaggtccacgacgccgacgccggcggcggcgggatctcctacgtcccgtactccgacggctacgacgaagggttccggctgttcgccagcgacggcgaggcggcgtggcggcactcggagacgttcgggagcgtcggccgcgaggcgttcgccggcgtggtggaccgcctcgccgcgcgcggccgccccgcgacgtgcgtcgtgtacgcgttcctgatgtggtgggcggccgacgtcgcgcgcgagcgcggnatcccgcgggtgctctactggatccagccggcgaccatgctcgccgtgtactaccactacctncacgggctcgaggagctcgtgacggagcancgccgcgagccggagttacggtggacatgccgag

SEQ ID NO: 43631 - DNA, 419 bp, Oryza sativa
  Clone ID: uC-osroM202040g10b1
tgctgcctttggaaatcatgtggacacatatggtggactagatatttgcatcaattgtgctggaattgccatcaagacactagtttatgatgatagatctgatggaactagcacatggaggcatgctgtaaatgtgaaccttgttgctgttattgatggtactcgcattgcaagtcaaattatgcgatctgggaagaagcctggtgtcataataaatattggttcagccgcaggcctttatcctatgaactttgatcccatatatagtggaacaaaagctggcgttggtatgtttacaagatcacttgcttcattgaaacgccatggtatacgtgtcaatggactctgcctgagtttgttcaaactaatatggcagagcaactaagtcgtcgaataatagatgtaactggtggatatat

SEQ ID NO: 43632 - DNA, 543 bp, Oryza sativa
  Clone ID: uC-osroM202040g12b1
ctccccgccgccttttttcgccgctcgccgccgccgccgccgccgccatgggtgcgtacaagtacgtgtcggagctatggaggaggaagcagtcggacgtgatgaggttcgtgcagcgcgtgcggtgctgggagtacaggcagcagccggccatcgtccgcctcacccgccccacccgccccgacaaggcccgccgcctcggctacaaggccaagcagggttatgtggtttaccgtgtccgtgtgaggcgtggtggcaggaagaggccagtgcccaagggtattgtctacggcaagcccaagcaccagggtatcacccagctcaagttccagaggaacaagaggtcagttgctgaggagagagctgggcgcaagttgggcggactcagggtgctcaactcctactgggtgaacgaggactccacctacaagtactttgagatcatccttgtggatgttgctcacagtgctatccgcaatgacccaaggatcaactggctctgcaagcctgtgcacaagcaccgtgagctccgtggtctcacct

SEQ ID NO: 43633 - DNA, 451 bp, Oryza sativa
  unsure (1)..(451): unsure at all n locations
  Clone ID: uC-osroM202040h01b1
gttgtactaactgatgaactgctctcatgcaagccagattaccataaagattgggtcataagcactgttgttagggtttctttcatgtagggaaaggaaaggtgatttcagttgcctgactgctgccagaatctgcgaagcatctacaagcgacgccgtcgttcaggcagccggcacggcaatgccggttccccttgctccatacccaaccccgcctgtgccatttacacctcccaatggggctcaaagccagctcgtgtgctctgggtgccgtaatctgctcatgtatccagccggagcaacgtcggtttgctgcgcagtttgcagtaccgtgactgctgtgcctgctcctggaaccgagatggcgcagttagtttgcggaggatgccacactctcctgatgtatatacgcngtgcgacgagtgtgcaatgttcttgctgtcacactgtc

SEQ ID NO: 43634 - DNA, 517 bp, Oryza sativa
  Clone ID: uC-osroM202040h02b1
gttgtactaactgatgaactgctctcatgcaagccagattaccataaagattgggtcataagcactgttgttagggtttctttcatgtagggaaaggaaaggtgatttcagttgcctgactgctgccagaatctgcgaagcatctacaagcgacgccgtcgttcaggcagccggcacggcaatgccggttccccttgctccatacccaaccccgcctgtgccatttacacctcccaatggggctcaaagccagctcgtgtgctctgggtgccgtaatctgctcatgtatccagccggagcaacgtcggtttgctgcgcagtttgcagtaccgtgactgctgtgcctgctcctggaaccgagatggcgcagttagtttgcggaggatgccacactctcctgatgtatatacgcggtgcgacgagtgtgcaatgttcttgctgtcacactgtcaacctggctatggaagatattttcctgtggcttgaaagcacagcaatcagtccgtagcaataaaca

SEQ ID NO: 43635 - DNA, 461 bp, Oryza sativa
  Clone ID: uC-osroM202040h03b1
gttctttggaacgcgtacttacccacaagttaggtgcatgccatggcaccattcatggcgtgcgcctcgccaccggtactcacgctggccctgctcgcgtcgtgcggtgcccttctcgccacctccatgctcccggcgcgtgcgacggcgggcagttgcttggacgtcggcgacatggtgatgatggacaggttccgcgcttggcagggagctcacaaccggtcgtacccgagcgcagaagaggcgctgcagcggttcgatgtgtaccgccgcaacgcggagttcatcgacgccgtcaacctgcgcggcgacctcacttaccagctcgccgagaacgagttcgcagacctcaccgaggaggagttcctggccacgtacaccgggtactacgccggcgatggccccgtggacgactccgttatcacgacgggtgccggagacgtcgacgccagcttcttcta

SEQ ID NO: 43636 - DNA, 375 bp, Oryza sativa
  Clone ID: uC-osroM202040h04b1
gtgctcatttctcagataaagaggacaaagcaggcgcggttgtataagagctggcgtttctgctccactgttggctgtctttgagaagtcatttagccactccccaccaaccccaaggacagcttggatcccttgggcaaacctaaaagcacctcgtggccctgtgctaattgatgtctgtagaaggtcctcaaccaacttaggcaattcgccagctctatcttggaggccagtggagaagtcctgggcctggctgtacctcgcgaaaaccctaatcccgacccgccgacccttttcccggctggccctgatcctccttcccacatgcgggggtgagcttctcccgccgcccgccaccagggggaggaggcggaa

SEQ ID NO: 43637 - DNA, 515 bp, Oryza sativa
  Clone ID: uC-osroM202040h07b1
tttgctcagcaagttcttatgatgaccactacaaccgtgtccgttgcacgcttgcgtcttatatcatcaacgagaactcaactggtgaagtgaaatttagcccaatgaggcgagtattgttggagatgattgagaaagcgttttcaaccataaaccttgaaacgcacactggaactcacccaaggattggagtcattgatgacatgtccttccaccccttgaatcaagccacaatggaagatgctgctcaactggctaagactgtggcctctgacattggcaacttcttacaagtcccagtattcttgtatggagcagcacaccccactggcaaacctgtgactgcagtacggcgtgaactgggctacttccagccaaattacatgggcatccaatggatgggtcaggtactccctgatattctgccggtgaagccagatgagggcccagatcatgtttctcgtgaaagaggtgccataatgatcggtgctgcacctttacccctgaactataat

SEQ ID NO: 43638 - DNA, 508 bp, Oryza sativa
  Clone ID: uC-osroM202040h08b1
tttgctcagcaagttcttagatgaccactacaaccgtgtccgttacacgcttgcgtcttatatcatcaacgagaactcaactggtgaagtgaaatttagcccaatgaggcgagtattgttggagatgattgagaaagcgttttcaaccataaaccttgaaacgcacactggaactcacccaaggattggagtcattgatgacatgtccttccaccccttgaatcaagccacaatggaagatgctgctcaactggctaagactgtggcctctgacattggcaacttcttacaagtcccagtattcttgtatggagcagcacaccccactggcaaacctgtgactgcagtacggcgtgaactgggctacttccagccaaattacatgggcatccaatggatgggtcaggtactccctgatattctgccggtgaagccagatgagggcccagatcatgtttctcgtgaaagaggtgccataatgatcggtgctgcacctttaccccctgac

SEQ ID NO: 43639 - DNA, 407 bp, Oryza sativa
  Clone ID: uC-osroM202040h09b1
gctgtttgagttcgagtgcttccttgacaagacctggactgtttgaaatgtcttcctatcgaactcagctggatatgcgactttaacacgaactgctcgcgatgcacaggctaggaatcagctcgagcgctttactgaatgtctcgagagagagagttgtgagacattccaagattgtattacctgtgaccggctcaagctcgcggagtatatgtacacccgtgtgaagcatctgacatacactactactgaagatgctgtgaccagctctggagctcctttctggtctgctccaaatcgtttaccacgaccactggagttcttgacgtctgatccaaggcagcttaacttctttttggatgctgcaatcttaaggctagagacatttgggatacccatacctgact

SEQ ID NO: 43640 - DNA, 192 bp, Oryza sativa
  Clone ID: uC-osroM202041a02b1
caaggattctggtctggagaaagctgccagaagtgcttcccaatcaaaggtggaaaatggctcaccttcagaaatcattttagatgattttgaagacttgagccctctatcagaaaatgatgactccactgttagtatcactgtagtcggagcatctggtgaccttgccaagaagatgatatttcctgcact

SEQ ID NO: 43641 - DNA, 391 bp, Oryza sativa
  Clone ID: uC-osroM202041a03b1
atcctctccttcctcttcctctgctcactcagctctcccccgcgcgcgccaccgtcgtcgccatgtcgggcaacatcgccttcggccgcttcgatgactccttcagcgcggcctccctcaaggcctacgtcgccgagttcatctccaccctcgtcttcgtcttcgccggcgtcggctccgccatcgcctacaccaagttgaccggcggcgcgccgcttgacccggccgggctggtcgccgtggcggtgtgccacgggttcgggctgatcgtggcggtggccatcggcgccaacatcttcggcggccacgtcaacccggccgtcaccttcggcctcgccctcggcggccagatcaccatcctcaccggcgtcttctactggatcgcccagct

SEQ ID NO: 43642 - DNA, 451 bp, Oryza sativa
  Clone ID: uC-osroM202041a04b1
gccaatcttcctttcccacatcctcctccgccgccggctgctttccaccggctcccgatctccgaggcaagcagcgccgcacccggccgctgccgccgccgccatggcgttcgagaagatcaaggtcgccaaccccatcgtcgagatggacggtgatgagatgaccaggatattctggcagtctatcaaggacaagcttatctttccatttttggatctggacattaagtactatgacttgggagttctccaccgtgatgcaactgatgacaaggtcaccgtggaggctgcagaggctactctcaagtacaatgtggctattaagtgtgcgacgattactccagatgaggctcgggttaaggagttcaacctaaagcaaatgtggaagagccccaatggcacaattaggaatattatcaatggcactgtattcagagagccaattatatgc

SEQ ID NO: 43643 - DNA, 370 bp, Oryza sativa
  Clone ID: uC-osroM202041a06b1
ctctcttcttcttcctctagtcctctcctgcctgcttcgtctactcctctcccaactccgatcccctcctctgcgagctcccggtggccggacccgtccggcgacgacgatgagccgctcgccggcacggcgccctgctcagatctgaagagctgcgagaatccgaggctgctcttgctggtttagctccggcggcggcggcggcggcggcgatggaggaggaggtggaggcggcaaacaggccgaccgaggagagttgccacagggtgctggccttgctgtggcagcagcaggaccctgcgtggctcaggagcatagcttcagagacaggagaggcctgtgccaagctcaggaagctgcgaattaagag

SEQ ID NO: 43644 - DNA, 392 bp, Oryza sativa
  Clone ID: uC-osroM202041a07b1
agttcaccccatggcctggaactaccgctgagctttcggctgaattagtagattccaaacaagatcaggagggtaggcggttgtcaagaaccgacagatcatcttggtcccgaagcaccacacagcggaaggagaactgaagcaaaagcaacacatgttgtaatgtatatcatacatctgcacaaactacaataggaaccatgtctggttaatctggctgggattatgcttattttttttcctgacgctttgctaatgtggcagcgcttcatactcgtatgtcttctgtagaagactgtttttttattggtagctggattatctatgttggaatatacagagcaatttgaatcaaggaaatggaagctgggtcctggatattaaaaagaaaa

SEQ ID NO: 43645 - DNA, 246 bp, Oryza sativa
  Clone ID: uC-osroM202041a08b1
tcttaacgccgccgccaccgacgccgccgtcgccgccgaatccgagacccccatctcggattcacctctcccgcctccggcctccgtcaccgtctccccacgcgcgtcagtcatggcgggaatggcaccagagggatcccagcttgatgctaagcactatgattctaaaatgcaggagcttctgaaccaaggtgaaaccgaggagttcttcacatcttatgatgaagctcatgagagttttgatga

SEQ ID NO: 43646 - DNA, 112 bp, Oryza sativa
  Clone ID: uC-osroM202041a09b1
ctcctccgctccttgttccttcgccaagacacaggggaggggcggcgatctccatttggcgaggagagcacagcatgggaggtgaggggaggggatcttggtcatattttac

SEQ ID NO: 43647 - DNA, 424 bp, Oryza sativa
  Clone ID: uC-osroM202041a10b1
ttcagtttagctctcttgctcctctagctgaccactctactatacacacacatatatacttttttcttggtgtattagtaagcacacctcatcgacatcaatggccaccgtagaggttgagaccccgaccaccgtgctggccgaggaggcgccagtggaggcgacgccggcggccgccgccgccgaggtggaggcgccgaaggaggagacgccggcggcgccggccgaggctgtggccgaggaggcggcgcccgccgaggccgaggtggcggagaccaaggaggcggagccagctgcggccgagccggcggcggaggaggtgaaggaggccgagcccgagccggccgagccggaggccgagcctgccaaggaggaggtggcgccagagcccgccgccggccgccgaggaggtgaaggtggagga

SEQ ID NO: 43648 - DNA, 267 bp, Oryza sativa
  Clone ID: uC-osroM202041b01b1
gcagctttgagcttagctatggcaatggccgcgccgctgacgttggtggtggtggcggcggcggtggccgtcgtcttcgtcggcggcggcgtggaggggtgggtgctcaaggaggggttctacgagcagagctgcccgcgcgcggaggcgctggtgaagcactacgtggagcagcacgtccccctcgcccactccgtcgccgccaccctcatccgcacccacttccacgactgcttcgtcagggggtgcgacgcgtcggtgctgctg

SEQ ID NO: 43649 - DNA, 481 bp, Oryza sativa
  Clone ID: uC-osroM202041b02b1
cttattgtcacttccatctcattctcctaattgtcatcactagcttctagctagcttaattaattaattagccatggcggaggagaagcaccaccaccacctgttccaccacaagaaggacgacgagccggccaccggagtagactcctacggcgagggcgtctacacgtcggagacggtgaccaccgaggtggtcgccggcggccaggacgagtacgagaggtacaagaaggaggagaagcagcacaagcacaagcagcacctcggcgaggccggcgccctcgccgccggcgccttcgccctgtatgagaagcacgaggcgaagaaggacccggagaacgcgcacaggcacaagatcacggaggagatcgcggccacggcggcggtcggcgccggcggctacgccttccacgagcaccacgagaagaagaaggaccacatgagcgccgaggagtccaccggcgagaagaagcaccacctc

SEQ ID NO: 43650 - DNA, 460 bp, Oryza sativa
  Clone ID: uC-osroM202041b03b1
gttggttcgagtttgtttgcaaggcaaaccaacattacctacatagatggcaccgtgataatcatggaattgtttcttctcctttttacatgatcctgtaaatgaaaggaaggtactactgatttattggatgatctttcgtgacttgcggctaaaatgatggtgtagttttaatctctgtattcccgtttcatatcatagaaaaaaagaactaatgtggttaaaaggtgagatattgtatttttgttgaatgtttataatctctaataggtttatttttctggttttgaggcttgtgggcctaatataccttgagacagtggcccatggctgataaccggaaatgagtcctgacttactgctgggacttatcgaagatcctgttttgagctaaatatgatttcatttcaggtgcaagttctgtgattctaaaggaatcagcatctgccttctagaggtg

SEQ ID NO: 43651 - DNA, 488 bp, Oryza sativa
  Clone ID: uC-osroM202041b05b1
ccatcccatcgcttcccccctccacccgtctcctccgtctccggcgccggcgccggcgagctcgccccccgcgattcgtgccctccgatcagaggcgaggcgggagaagagatggggctcacgttcaccaagctgttcagccggctcttcgccaagaaggagatgcggatcctgatggtgggtcttgacgcggccggaaagaccacaatcctctacaagctcaagctcggcgagatcgtcaccaccatccccaccatcggattcaatgttgaaaccgtggagtacaagaacatcagcttcaccgtctgggatgtggggggtcaggacacgatcaggcctctgtggaggcattatttccagaacacccagggtctcatctttgttgtggacagcaatgatagggaccgtgttgtcgaagccagggatgagcttcacaggatgctgaacgaggatgagctacgtgatgctgtgctgcttggcttttgcta

SEQ ID NO: 43652 - DNA, 421 bp, Oryza sativa
  Clone ID: uC-osroM202041b06b1
gagaaatgaaaagcgagccatttgaagctggtggttacaaatggtatattcttgtataccctcaaggatgtgatgtttccaaccacctatcactttttctctgtgttgctaatcatgacaaacttctcccagggtggagtcattttgcgcagttcactatagctgtaggcaatatagatcctaagaaagtaaaatactccgatactttgcataagttctggaagaaggagcatgattggggatggcaaaaatttatggagttgccgaagattcaggatggctttcttgttgatgatgttcttgaaatcatagctcaagttcaagttatcagggagaaggtggacaaaccatttcgttgcctcgatcgcccttatcgaagagaattgctccgtgtttatacgacaaacatcgagtcaatata

SEQ ID NO: 43653 - DNA, 482 bp, Oryza sativa
  Clone ID: uC-osroM202041b07b1
gttatagaattgtggcgtggtcgaagtgctagagatcaaaatctgaaggacactggccgtaaaatgtggagatctgtcaatgaattaatgcttgctcggtgggataaatcaaagcctgctggcgtgtcaaacttaatacttctcaagttcaatgaggcagatgcacatgaatccaccactcttgaccaaataaaggaagaagaacctgaattttacaacatggtttcacgtgttctgaaacaagctgaagcagaatttgctttatgaatgagccattaatcactagatgctccagcttacggtgataccaacgatatcatggacgaagcagttagacttggttttttgaaggacccaattttttatattgctgatcaggaagccagtggaagcttgtgcaagttcatttttcagctgccaaatcattaccatatgctgccatagattgaacttggtaatatttgtggattctgaaaagaata

SEQ ID NO: 43654 - DNA, 422 bp, Oryza sativa
  Clone ID: uC-osroM202041b08b1
ctttcctaaacctcgccggaatccaacccctccgccgccgccatgagggagatcctgcacatccagggggggcaatgcgggaaccagatcggggccaagttctgggaggtgatctgcgacgagcacgggatcgaccacaccggcaagtactcgggcgactccgacctccagctcgagcggatcaacgtctactacaacgaggccagcggcggcaggttcgttccgcgcgccgtgctcatggacctcgagccgggcaccatggactcggtgcgctccggtcccttcggccagatcttccgccccgacaacttcgtcttcggccagtccggcgccggcaacaactgggccaaggggcactacaccgagggcgccgagctcatcgactccgtcctcgacgtcgtccgcaagggagcccgagaact

SEQ ID NO: 43655 - DNA, 306 bp, Oryza sativa
  Clone ID: uC-osroM202041b09b1
atcagtttagctctcttgctcctctagctgaccactctactatacacacacatatatacttttttcttggtgtattagtaagcacacctcatcgacatcaatggccaccgtagaggttgagaccccgaccaccgtgctggccgaggaggcgccagtggaggcgacgccggcggccgccgccgccgaggtggaggcgccgaaggaggagacgccggcggcgccggccgaggctgtggccgaggaggcggcgcccgccgaggccgaggtggcggagaccaaggaggcggagccagctgcggccgagcc

SEQ ID NO: 43656 - DNA, 346 bp, Oryza sativa
  unsure (1)..(346): unsure at all n locations
  Clone ID: uC-osroM202041c01b1
gagcgatccttgcggagctcataccgagcgcgccggcggcgaggcgcgtcacggcgggccacgtctggccgggcgacgccaacaaggccaagaagaagggcgcgcgcgccgacgacttcgaggccgcgttccgcgacttcgacaacgactccgatgacgaggagatgatggtggaggaggcggaggaggaggaggcnacctccgagcacaagccgttcgtcttccgcgccaagaaggctggcggcggcggcgtcgagcaggcgcaggaagccggcgcagtacaggggcgtgcggcgccggccgtgggggaagtgggcggcggagatccgcgaccccgacaagggca

SEQ ID NO: 43657 - DNA, 490 bp, Oryza sativa
  Clone ID: uC-osroM202041c06b1
gccaaatgttgatatcaaaaccgtgctgtctcaactcatggacaggttatcaagctatgctgccgcaagtcctgaagtattgccagaattcttgcaagttgaagcttttgcaaagttcagcaatgctattggaaaggtgatagaggcccaagttgacatgccagttgttggtgcagtaactttatatgtatcacttttgacatttactctccgtgtgcatccggatcggcttgattatgttgatcaagtgttgggtgcatgcgtaaagaaactttcagggaatgcaaaacttgaagatagcagggcaacaaagcaaattgttgcacttctcagtgcccccctggagaaatatagcaatattgttactgcattagagctctcaaactatcctcgggttatggattaccttgataattctacaacacaagttatggctcttgtaataattcaaagcataatgaagaacacgacttgcatatctacttctgac

SEQ ID NO: 43658 - DNA, 464 bp, Oryza sativa
  Clone ID: uC-osroM202041c07b1
cgatgaaggaaaaaaaaaggaggaaaagaaaagaggaggaaagcgaagaggttggagagagacgctcgtctccacgtcgccgccatggccgcccgcgccgccgccgccgcgttcctgctgctgctcatcgtcggcgcggccaccgcggcgccggacatgtcgatcatctcctacaacgcggagcacggggcgcgggggctggaggaggggcccacggaggccgaggcgcgcgccgcgtacgacctctggctcgccgagaacggcggcggctcgcccaacgcgctcggcggcgagcacgagcgccggttcctcgtgttctgggacaacctcaagttcgtcgacgcccacaacgcccgcgccgacgagcgcggcgggttccgcctcgggatgaaccgcttcgccgatctcaccaacgaggagttccgcgcgaccttcctcggcgccaaggtcgccgagaggagccg

SEQ ID NO: 43659 - DNA, 482 bp, Oryza sativa
  unsure (1)..(482): unsure at all n locations
  Clone ID: uC-osroM202041c09b1
gctcagtatgtcaagtataaggatccgaagcagcccgtctctgttcgtgtcaaggatctgctcggccggatgactctcgctgagaagattggccagatgacccaaatcgagagggagaatgccacggcggagcagattgccaagtacttcataggtagtgtactgagtggtggaggcagtgtgcctgctcctcaggcatcagctcaggcttgggcttcaatggtgaatgaaatgcaaaagggtgccctttcgacccgactaggtattccgatgatctacggtattgatgccgtgcatgggcacaataacgtctacaaggctacaatcttcccccataatgtcgggctcggcgctaccagggaccccgacctagtaaagaggataggagaagcaactgctcttgaagttagagctactggaattccctacgtctntgctccttgcgttgcggtttgcagagacccaagatggngacgctgcta

SEQ ID NO: 43660 - DNA, 477 bp, Oryza sativa
  Clone ID: uC-osroM202041d01b1
gctgatttggtgtggaggcggggaaatgcgtgatgtgtgagatctagggcgtggggaggcggatcgcagcaatggcggcgccgcggtgggcggtgtgggcggtgctgctgctgcggctgctcgtgccggcggcgcgggtgctcgccaacatggaaggtgatgcattgcatagcttgaggactaatttagtcgatcctaataatgttctacaaagttgggacccaactctggtcaatccgtgcacttggtttcatgttacttgcaataacgacaacagtgttatcagagttgatcttgggaatgctgcactatcaggcactttggtcccacaacttgggcaactaaaaaacttgcaatacctggagctctacagtaataacataagtggaacgatacctagtgaacttggaaacctcacaaacttggtcagtttggatttgtacttgaacaacttcactggtccaataccagattcac

SEQ ID NO: 43661 - DNA, 483 bp, Oryza sativa
  Clone ID: uC-osroM202041d03b1
ttcctctccttcccaagtcttcccacccaggcgcagaagtggctccggcggccggaaagtcaccggcgattcggcggcgccggcggcggcggacccctttctccacccctgccttgctccctcccgtctcctccatcagctgacttaactacactccgtaggagattttcagatcgagattgccggccatggcgtcgggccttgtcgtcgccgccaccgaccccctccgcgccttcctcgcctccgccgccgcctcccacgacctccccgctgacctccgcgacctcgcctcctccctcgccgcccgctccgccgtcccctaccgctccctccgcgacatctggtgcgccgcctcccccggcgcccgcccgcccctccgccgactcctacacggcgccgacttcctgctctccagccccaagccacgcgacaagagcgatgagctgaaggcgaggctggacaagctcagggagatgcaggaga

SEQ ID NO: 43662 - DNA, 474 bp, Oryza sativa
  unsure (1)..(474): unsure at all n locations
  Clone ID: uC-osroM202041d04b1
cacaaaccattgcaactgcactacactgcagcacacacaccccgcacccaccaagctaagtaattaatcatcaatggcttccgccgtggtgaagatggccgtcgtctgcctgctcctcctgtccgccggtcatctgatggcctccgccgccgccgcgcgcccggacaccgtcgacgacgcggcggcgctgctgcgcctcaaggaccgcatcgagctgcaggaggaggaggccctggccctcgccgaggagctcgccctcctcgacgacggcgccggcgacgccgtcggagccggctgctcctgcagcaccaccaagtgcaagacgtgcatcgccacctgcgggatcaagtgcttccccaagggaatcaaaggcttccccacctgcttcttcgcctgcgtcttcaccaccagcangtgcttcgccttcggcgcctaatcgatcaatcgatcacgtcgtcgtctcggctcgtcatc

SEQ ID NO: 43663 - DNA, 457 bp, Oryza sativa
  Clone ID: uC-osroM202041d05b1
atttttcggcttattcgttgctcatagaacacatcaccgcgacaaaaaataagcctctcttgttgtcacctccacacgtccatttgtcaccgctgatgagctttcgtgtgcgccagctgcacaaagaaagaccggtccataagagcggctgcctggttctgaatttctagtcgccacagcggagaggagccgatacttccatggccatgaagaagcttgtgctgaagctggacctgcacgatgacaaggataagcagaaggcgatcaaagccgtctccaccctccacgggatcgacatgatctccatggacatgaagggccaaaagctgacggtggtcggcgacgtcgacccggtggacgtcgtcggcaagctccggaagggctggccgtcggcgagcctcctctccgtggggccggcgaaagaggagaagaaggaggagaagaacccgaagagaag

SEQ ID NO: 43664 - DNA, 474 bp, Oryza sativa
  unsure (1)..(474): unsure at all n locations
  Clone ID: uC-osroM202041d08b1
aaccttcgtcttcgtcttcctctcgccgctgattcgattcgatccgatccgatccaaggggaggggaagcaatggcgacgaagaggagcgtggggacgctgggggaggcggatctgagggggaagaaggtgttcgtgcgggccgacctcaacgtgccgctcgacgacgcccagaagatcaccgacgacacccgcatccgcgcgtccgtgcccactgtcaagttcctcctcgagaagggcgccaaggtcatcctcgccagccatctgggccgtccgaagggtgtcacccccaagtacagcttgaagcctcttgttccacgcttgtctgagctacttggagtcgatgttgtgatggccaatgattgcattggtgaggaagttgagaaattggctgctgctttgccggaaggtggtgttctactcctagagaatgttagattctacanggaggaagaaaagaatgatcctgagtttg

SEQ ID NO: 43665 - DNA, 443 bp, Oryza sativa
  Clone ID: uC-osroM202041d09b1
cactaaccgatttcgcagcgccagcccactgattcctcaccgaattttttcattttttttctctctttccattctccccggcgatcgagtagccggcttctgctcgccgcccgcgcgccggagggaggcgaggtccaaagccggcgaggcgccatgcaccacgaccccaaccccttcgacgagggcgccgacgagaaccccttctccaatggaggaggtggcggagcacgtcgcggtggcggtggcggcggcggtggtggcggtggcggaggcaagtctcaggtctcgttcgggttcggcggcctaggcggccgccgcagcaagggcggcgccactgtcgacatccccctcgacaacatgagcgattcgaagggcacggggaaggagctgctgcaatgggaggcagatctcacgagacgagaggcggatctcacgagaaggga

SEQ ID NO: 43666 - DNA, 470 bp, Oryza sativa
  Clone ID: uC-osroM202041d10b1
cgcagctgagctgagctagcaagcgagcgagccgagctcgagctccatttgcttcttctcgtggcggcagcgcctcctccccgtcgccgtcgtctccacgtcgtccgctccgatccgcctcgatcggcgttcgatcgcgtccaccacctcgatctccagaaacctttatataagcagccgcgtccgcattcttgttcgatctatctctccacaccatgccttcgttgctcgactcgccgacgcagatcacgccggcggctgctgccggcgactggagctcgctgtacgcggcggcgcaggcggagactgccgtgaaggcgccgcggcatggggcggtggcggtgaagaaggccgcggcgtatggcggcggcggcgggaggaggatcaagaacctggagatgtgcaccgaggcgctcgggtgcgagaccggcggcgtcgacggcgcggcggacaccgccgccgatgccgtc

SEQ ID NO: 43667 - DNA, 396 bp, Oryza sativa
  Clone ID: uC-osroM202041d11b1
caaatctctcgatctcccattcgagcgagatgaagctctccatccagtcattcgcccgcaagctctccctcccgtcgccgaagcggacgtggagcagcggcggcggaagcagtaagagggatggtggcatgtccaagaacgggagcggcgtgaagcgggccatctcccgcagcgaggcgtcgtcgttcgcgtcggcgtcgtcggagtcggagtcgtcctcggacgacgcgctgatggcgaggtcgacaccgaggtcggtgctccccgcggagatctcgcggcgggagctggaggccgtgctccggcggctcgggcacggggagcccgacgacgaggagctggacgccgtcgcggtcatctgccgccaggcccaagcgggcggcggggaggaccagc

SEQ ID NO: 43668 - DNA, 480 bp, Oryza sativa
  Clone ID: uC-osroM202041d12b1
caccaaccgatttcgcagcgccagcccactgattcctcaccgaattttttcattttttttctctctttccattctccccggcgatcgagtagccggcttctgctcgccgcccgcgcgccggagggaggcgaggtccaaagccggcgaggcgccatgcaccacgaccccaaccccttcgacgagggcgccgacgagaaccccttctccaatggaggaggtggtggagcacgtcgtggtggtggtggcggcggtggtggtggcggtggcggaggcaagtctcagttctcgttcgggttcggcggcctcggcggcggcggcagcaagggcggtgccactgtcgacatccccctcgacaacatgagcgattcgaagggcaaggggaaggagctgttgcaatgggaggcagatctcaagagacgagaggcggatatcaggagaagggaggaagctctcaagagtgctcgggtgcccatggaggag

SEQ ID NO: 43669 - DNA, 499 bp, Oryza sativa
  unsure (1)..(499): unsure at all n locations
  Clone ID: uC-osroM202041e01b1
cgcttctccaggctcctcttcttcctgctcttctccaccaccgcgctctactcctccacctcgtcgtcctcctcctccgccgtgctccgcgccacgacgacgacgacgaccaccaccacaaccaccacgaccaccaccaacaccttcaccctctccttccaagccaacccaaaccctcccccatctaacctctccaaccacactgccctggacgcggcgggggcggccgggcacacgcagagccacgtggtggtggggcggcatgggatacggatccggccatggccgcaccctgaccccgtcgaggtgatgcgggcgcaccggatcatggagcgcgtgcaggaggagcagcggaggtggtatggcgtcaaggagccgcgccatgtcctggtcgtgacgcccacctactcccgcgcgttccaggcgctccacctcaccggnctnctccactcccttcgaacgtgccctacccgctcacctggatcgtggtcgaggcagg

SEQ ID NO: 43670 - DNA, 494 bp, Oryza sativa
  Clone ID: uC-osroM202041e03b1
cagtatcatctgaaagtcctgagtcatcagaggaagataaaaggccttaccaaaggggagatagggtcacgtatgttggatcctcagaagcctttgaagcagatcacaggatcattttagggaaagtacctactaaagatggctcaagaaatgcctatacctttattagtggcaggactttatcaaagggacaacggggagaggtatatgagatcaatggggatcaaagcgcagtcatattggaccctcttgcagagaagctgcatgatggtgatcatgatgcaactagcaaggaggaaaatactgaggcatccatttactgcgttgattctcaggacattgttcatgaccatgatactgagtcagaagattggcatatcgcaattgcagcactttgcgaggctctgccatctctacagccagcaattgtctactctccagacagatgccagtggctatctagagcagttccaaaatcaaatcgcagagagttt

SEQ ID NO: 43671 - DNA, 487 bp, Oryza sativa
  Clone ID: uC-osroM202041e04b1
attagaggctggcaggccgatgcgatcgaagggcttgcgagatcacggtgcaattagcaaaagcaagcaaaaggcggagtccgaacttcctttttgagtcttgctgtaaacgtctgtcatgcagtaggtccgaacggccacattccctttgtgctcacaacagcaacgtcctaaccacctgctcccagccttcatggctgagtcgacatgcgagtggctgatatgaaggagctgtagcttgtttgtcaccaggttcaagccgaagcagtgcctctaagagcgtgacgccatggctacaaagaagtccagcagcagtgatgcggagtatgactttgccacagtaactggttcgtcagctgatatagaagatgactttgattgggcagacgacgaactaccagccggcgccacacctgcagcagcagctactgcaagtcaggcagccccatcacagccagcatcagtagctttgaaagcagggcccatt

SEQ ID NO: 43672 - DNA, 476 bp, Oryza sativa
  Clone ID: uC-osroM202041e05b1
attcataggacacccctcttaagttattcccccatgacaactcttattctttaatttgcttggcagattcttcccgttcgcctagaagttatcctggaacacatccacattgtgcagagagttagaacttagaaggcattggtttttcctgttctttttgttcattctttagtgaagatagatttctttaatacgcttgtaatgccagtatttaaggtgaggtagacctttgaaggaagggatgacttccataccagcatgagatgatagtgagagagatgaagaaattttagctgttcttctcctgtctttgttagcttaggaccatcatttgctgtttcagctggctcttttcctgtcgaagaggttcacctctgctgcttgatctttcctttgtgctgctttctggtgagaggagactaaattgactagcatcaatgctactgtttggaagaaaagacttctcgctgtgttgg

SEQ ID NO: 43673 - DNA, 420 bp, Oryza sativa
  unsure (1)..(420): unsure at all n locations
  Clone ID: uC-osroM202041e06b1
ctagtcttcgctccccaccaagctccgccaccgccggaaccctagacccgccggcgatggcccgctacgaccgcgccatcaccgtcttctcccccgacggccacctcttccaggtcgagtacgccctcgaggccgtccgcaagggcaacgccgccgtcggcgtccgcggctccgacaccgtcgtcctcggcgtcgagaagaagtccacccccaagctccaggactccaggtcggtgcgcaagatcgctagcctggacacccacatcgcgctggcgtgcgcggggctcaaggcggacgcccgcgtgctcatcaaccgcgcgcgggtcgagtgccagagccaccgcctcaccgtcgaggacgccgtcaccgtcgagtacatcacgcgctacatcgncggnctgcagcagaagtacacccaga

SEQ ID NO: 43674 - DNA, 496 bp, Oryza sativa
  Clone ID: uC-osroM202041e07b1
acataaaagagcaatagctccctgtaatcactaagatatggcatgaaaatctcttagatgtggaagctttttcttgattgtcacaaaaggtgctcttgcttagatgcgtaccaatgtcatatctccaatcaccctgctaaggtaagtatgatttgtttgccacataggaaagtaatcagtgtggtttgaagaaataaaatggcatgccatttttaatctaaaatgcaaaaacaacacttttagtgtgtataaagggagatagattgagctaagtttacatgttgtactataccttcagatttcagttctttgctgcagataatagtggcacaaggttcctggtttgaaaattttttgttactgcaaaaatagtcaataaaacttcgctattgtttgtgttgcttatttccattaaattacttctcagaagctatgttccttctctgtcttgctagcttgtccttttcactgggttcaattgtaagacatgaattat

SEQ ID NO: 43675 - DNA, 487 bp, Oryza sativa
  unsure (1)..(487): unsure at all n locations
  Clone ID: uC-osroM202041e08b1
cgcgtccatggccaccgccgcatccacctccgccgccgccgtcgccgccgcatcgcgcctcctcgtccgccgcgcgccgccgcgcctgctgcgccggttaccccgcgcggcgctcgccgcctctcgcccgtcgccgccgtcgtcgtcgtcgtacggtgcagcagccgtcgccctcggccggcagccgctcggccaccgcgctaggatgggacacaccgccgccgccgccgccgccgcgggccccgcgctcgggctcaccaagcccaacgccgtcgagccgccgcaggtttcatttgctgctaaagacgtcgaattctccgaatggaagggagacatcctcgcaatcgcagtgacagagaatgatctggtcaaaggatcagactccaaattcgagaatgcggtgttgaagaagctcgacggccagctcggcggcctnctgtcggaggcatcggcggaggaggatttcaccggcaaagccgggcaatca

SEQ ID NO: 43676 - DNA, 376 bp, Oryza sativa
  Clone ID: uC-osroM202041e09b1
ctatcttctcctccggctcttcttcagtatcgaatcctctcttctcctcgtgcccaccaccaccaccgtagcaatggcgggcaacgggccgatcaacaaggaggacccgctcaactggggcgcggcggcggccgagatggccggcagccacctcgacgaggtgaagcgcatggtggcgcagttccgcgagccgctggtcaagatccagggcgccaccctccgcgtcggccaggtggccgccgtcgcccaggccaaggacgccgccggcgtcgccgtcgagctcgacgaggaggcccgcccccgcgtcaaggccagcagcgagtggatcctcaactgcatcgcccacggcggcgacatctacggcgtcaccaccggc

SEQ ID NO: 43677 - DNA, 493 bp, Oryza sativa
  Clone ID: uC-osroM202041f03b1
ccatactctcctttaccccaatctcgtgagcggcgacgaactttgccaccgatttcgatccttttttttggcagcgtgtagtgacgcgagagagaaatggcgagcaagaggagcgtgggcaccctgacggagtcggatctgaaggggaagaaggtgttcctccgcgccgatctgaacgtgccgctggatgacagccagaagatcaccgacgacacccgcatccgcgcgtcggttcccaccatcaagttcttgatggggaagggcgccaaggtcatcctggccagccatctgggtcgcccaaaaggtgtaaccccgaagtacagcttgaagcctcttgatccgcgcttgtctgagcttcttggtgttgatgttgtgatggccaatgactgcatcggtgaggaagtccagaaattggctgccactttaccagatggtggtgttctgcttctagaaaatgttcggttctacacggaggaagagaaaaatgaccctg

SEQ ID NO: 43678 - DNA, 339 bp, Oryza sativa
  Clone ID: uC-osroM202041f04b1
gtgatctgatcgattcaacgaggtcgacgccttaacgagagagagagagagagagagagagagagagagagagagagagagagagagaggagaagaaaaagaagcttagctcgatcgatcgctccatgctctgtgttgttgcgagatttggagagaagtattgatggttgtgcagaagatgtggatgcccgtggatctccggctgccgtcggggccacaggcggcgcttgggatcctcgcgttcgaggccgcggcggcgatgtcgaagctgctgtcgctgcaccggtcgctgtcggagcaggaggtgtccaggctccggtccgacacgatgcggtcgcc

SEQ ID NO: 43679 - DNA, 504 bp, Oryza sativa
  Clone ID: uC-osroM202041f09b1
tcgtgctcccctcgtcgtcgccgccgccgcctcgcctcctcggagatcttcgctgcccttccgccaacatggggaagacacgtggtatgggagctgggcgcaagctcaagacccaccgcaggaaccagagatgggcagacaaggcctacaagaagagccacttgggtaatgagtggaagaaaccctttgctgggtcatctcatgccaagggcatcgttctggagaagattggtattgaggccaagcagcccaactctgccatccgtaagtgtgctcgtgtgcagcttgtgaagaatgggaagaagattgctgcctttgtgcccaatgacggttgcctgaacttcattgaggaaaatgatgaggtgttgattgctggatttggtcgcaagggccatgctgtgggagatattcctggtgtccgattcaaggtcgtcaaggtctctggtgtgtctctccttgctctcttcacggagaagaaggagaagcccaggtcttagattactg

SEQ ID NO: 43680 - DNA, 453 bp, Oryza sativa
  Clone ID: uC-osroM202041f10b1
ctctcctctcgctgttcccgacggaggaagggtggcagtggcacgcacgcacgccggcctcgcctcagcctcgcctcctcgcgcgcgcgcggccggacgggaggcacacggtgcgcggccggccggcctcattcgctcacctcgtcattgaactatataaaaaggttgtttgtcatgggtatttcatcgaagtggtttaaatcactggttggtataagaaagcaagaaaaggcccggaatgcagaaaaacaagaaaaggcacaaaatgcagagagctgcgaaacaagcacccctgctgctcagttgcttcacaaacggaaacattctttggatactgaacgtgcaatcttagtagaagaacttgcagtgcacagtgaaccattgactgatgacaccaacacgcagacagtttcagattccatttcttcagacagtacattgcttggagtacat

SEQ ID NO: 43681 - DNA, 460 bp, Oryza sativa
  Clone ID: uC-osroM202041f11b1
gcgcgagctcaactgcctcgcttcctccctcctcccgatcgaccgcgccatggctgccgccgccgtcaccaagtcgccgccggcgctggtgcccccggcggggcccaccccgggcggctccctcccgctctcctccatcgacaagaccgccgccgtccgcgtctccgtcgacttcatccaggtcttcccctcctccgccgaagccgccaaggaccaggccgcatcggtcgccgccatgcgggagggtttcgccagggcgctcgtccactactaccccgtcgccggccgcatcgcggagccggtccccggggagcccgagatcgactgcaccggggaaggggttgtggttcatcgaggccgaggcgagctgctcgctcgaggaggcgcgcaacctcgagcgccccctgtgcatccccaaggaggagctgttccctcgcccgccgcccgaggtccgcgtcga

SEQ ID NO: 43682 - DNA, 498 bp, Oryza sativa
  Clone ID: uC-osroM202041f12b1
caaatattccacttccatttgttttctcttttggattcaagaagactaatgattcgtcagagggacctatattgaatgccatggagatctacaaatatatagagatttctgtgggatctcaagatgcaaacattatggccagcttggtctcacggtatccagaagcaggttgggcacaagagggtggtgacccttgcttaccagcatcatggtcttgggtgcaatgcagttctgaggcagcacctaggatattttcaatctcattgtcagggaagaacattacagggagtatccctgtggaattaacgaagctatcggggctggtcgaactaaagcttgatggtaactcatttactggtcaaattcctgatttcactggatgccatgatttacaatatattcaccttgaggacaaccaattaaccggtgcattgccaccttccttgggagaactacctaactctgaagaagtgtatattcagaacaataagctgtctg

SEQ ID NO: 43683 - DNA, 492 bp, Oryza sativa
  Clone ID: uC-osroM202041g01b1
cgcgaagtgccgtcacagcggctgcttccccctctctcttccgcctcggcgagcagcgacaccaccggagcagggcggccggcggcgacgggcggggcccgacggggaggaggtaggcgggcttggatctgcagggctcacgcggcgtaagagcaggggaagccgtatctccggcggcgttcatcgcagcaggaagtcgtcatggcgacggcggagccggtggagccgcagtcgctgaagaagctgagcctcaagtcgctcaagcgctcgcacgacctcttcgcgcccacccactccctcctcttcactcccgatccggagagtaagcaggttcgtgtcggctgcaaggtgaatgcagagtacagcgcggtgaagaacctaccaacagatcagggccgaggacaggtcaagagtgctgcggcaccttcaactgcattggcgcttccaggaacacaagatgtcaaagatgctgataacaaaggcagcagtact

SEQ ID NO: 43684 - DNA, 401 bp, Oryza sativa
  unsure (1)..(401): unsure at all n locations
  Clone ID: uC-osroM202041g02b1
cttttactcttcttgacaagagtagaacaacaacaacatcatcatcatctatcacacacactatcagggcaggtgatcgaatagctaggaagcaagcaagcagagagtagtagatcgagtgatcggaggatggggtcgcggtacgaggtggaggtgacggtgtcgtcggcgcgggacctcaagaacgtcaactggcgcaacggcgacctcaagccctacgccgtgctctgggtcgacgacggcgccaagtgctccacccgcgtcgacctcgacaacgccgacaaccccaactgggacgacaagctcaccctccctctccccccctcctanccgctngacgacgcccttctctacctcgacgtcgtccacgccaacgccgccgagggcgtcaagccgctcgt

SEQ ID NO: 43685 - DNA, 395 bp, Oryza sativa
  unsure (1)..(395): unsure at all n locations
  Clone ID: uC-osroM202041g03b1
ggcacacaaacacagagagcagcccaaaccgaccaaaatcactgcagagttcaggcacttcttcagatagttctccccctctgtttctttctctctttatttctttctcgagttcagtttgagagatggatttggcgtggcggttcgcggtggccgcggtggcgtgcggccttgtggggggcggcagcgccgggctgctggagaccaacccgggtttggcgtacaacttctaccagaagtcgtgccccaacgtggactccatcgtccgcagcgtcacctgggcgcaggtcgccgccaacccggcgctccccggccgcctcctccgcctccacttccatgactgcttcgtccagnggtgcgacgcgtcgatcttgctggacaacgccgggagcgag

SEQ ID NO: 43686 - DNA, 462 bp, Oryza sativa
  Clone ID: uC-osroM202041g04b1
gcataatgtgcaattagcctgcaggcagctaatcagtagtagcttgctagccatggcttctgcaactaattcttcacttagcttaatgctgctggcggctgcagctatggcgtcagtggcatcggcgcagctctcggcgacgttctatgacacgtcgtgccccaatgcgttgtccaccatcaagagcgtcataacagccgccgtgaacagcgaggctcgcatgggggcgtcgctgctcaggctgcacttccacgactgcttcgtccaagggtgcgacgcgtcagttctgctgtccgggcaggagcagaatgctggcccgaacgtggggtcgctgaggggattcagcgtcatcgacaacgccaaggcgcgggtggaggccatctgcaaccagaccgtctcctgcgccgacatcctcgccgtcgccgcccgtgactccgtcgtcgcgctgggagggccatcatg

SEQ ID NO: 43687 - DNA, 460 bp, Oryza sativa
  Clone ID: uC-osroM202041g05b1
gagttgaggttgctgtatttatcgtctttgtcctcatctttctttcttgctttcctctaccttgactttggcttccccactctctcttcttcttgggaggctgggagctaccagcacaacacaccaaggaagctgaggtgcgttgatttcttgatatcatggccaagaggcacctcttgttggcgacaacttgcttgtgggctctgtcatgtgccttgctgcttcatgcttcctctgatgggttcctgagagtcaacctcaacaagaagagattggacaaggaagatctcactgccgccaagttggcgcagcagggcaaccgtcttctgaagaccggcagttcagacagtgatcctgtccctctggtggactacctcaacacccagtactatggggtgattggcctcggctcaccgccgcagaacttcacggtgatatttgacactggaagctccaacct

SEQ ID NO: 43688 - DNA, 340 bp, Oryza sativa
  Clone ID: uC-osroM202041g06b1
gttttcgcttcggctcgctagctagctctgctgtttctgtgagagccgggagcaccaaccgcgcgtggggtgggtgcccggaggtttgatgcgcgtggccgccggtttctccccgtcgtttgatgggcaacgcatgcggcggttcccttagatccaagtacctgagcttcaagcagaccgcgtcgcagcgccacgacaccgacgacaacaacaacgccgccgcggccgactcgccgaagaagccctcccgccctccagcagccgccaagacggacgaccacccagtctccgcgttcggcgccggccgtcgtcatgaggcgcggacaggcgcccgtcgacc

SEQ ID NO: 43689 - DNA, 442 bp, Oryza sativa
  Clone ID: uC-osroM202041g07b1
cgtactgccggtttgctagccgcctcgctgctccggctccgcctctccacccatcccgccgccaccgccgccgccgccgcctcatcctcctctctacccgcgccgccgcgcctagctatctctaggaagggaggagaaggggccgggtgcgcgcgcgctcgctcgctcgctcgtctcgccggatctacagccgccgccgccgcctccgggtgttctctgcttgggatctatctcgtgagccaaagccatggcccgccgtcgcgccgcctcaggtcccggtcgtcgcgccggcgcccgctgctgctgctgctcctcctgccccggctcctggccgcgacgacaccgctgcccccgtcgcggatcaaaccacggatctgctgcagaagttgtctttggattcgcagcccaaggcggtggatgcggccaccgagcccgccggcgc

SEQ ID NO: 43690 - DNA, 370 bp, Oryza sativa
  Clone ID: uC-osroM202041g08b1
ctgttacctctccaattcattctctgctactgtctccaacatatccatgtttccactccacacccatctagggatcttactcctgctcctcttctctcttgcgcaatccatcatgctccgccgcagtgaatgatactctcgcggaggtgcaggtgctcaccgtcggggagacgctcatctcgaggcacgggaagatcgggctcggcttctacaagccggcacatcctgcaggcaatgcgagtgagtctggcaacatcacctctcctggaaggtaccttgctatatggaccaacaagagcccggctagcaccaccgggtgggttgctcatagggagaggccaatcactgatctagagatcaggttaacaca

SEQ ID NO: 43691 - DNA, 479 bp, Oryza sativa
  Clone ID: uC-osroM202041g11b1
ttcctcctcctcctctcctcgctcgtggccgccaccatgtcaggcggcctctacaaccaccagggtttctccccggcaagaaccctctcgccccagattaggagcaaccccgaggccgataggtacggcctcgcccgcttccgccgccgccgtggattgctactgtgtttcttgctgattctttgatccaaggattgcttcttgctcttggttgcgtgcccttttttcgatttgtttaggtgattggttgtgcgatttcttgggttttgtttctttttgcagccagtacttgagcgagctgctcgcggagcatcacaagctggggcctttcatgcaggtgctgccgatatgcagccggctgctcaaccaagaaatcatgcgggtatcaagcatggtcaacgaccatggattcaacgattttgacaggcgtcgttatagaagtccgagtcccatgtcttcgccattatgagacccaacct

SEQ ID NO: 43692 - DNA, 475 bp, Oryza sativa
  Clone ID: uC-osroM202041g12b1
tttttctctccgcgtcacttctcttccacctcttgtagtagctgcttctcctcccgatcgagcagaggcagtagtagcttagctagcagatatatactgtagcgatggagtaatatgatcgtcgatcgagccgatccgcgcgatgcagattcgccacgccctcgtccacctcattaccctggggatggttatcagctcggcattgatgatatggaagggattgattatcatgacagggagtgagtcgccactagttgtggttctatctgaaagcatggagcttggatttgaaaggggggatatcctgtttttgcaaatgagcaaacaccctatacgaacaggagatatagttgttttcaatgatggccgtgaaattccaatcgtccatcgcgttattgaggtcgttaagctatgtaatatccacaccaatcagtctccccttacatttgatctcaggtattatgtctgaaaattt

SEQ ID NO: 43693 - DNA, 400 bp, Oryza sativa
  Clone ID: uC-osroM202041h01b1
cgacgacgcgcacgagcagatcgacaccgccatagcgacggcactaagggagagcaagccagtgtacatcagcgtgggctgcaacctggcgggcctctctcacccgacgtttagccgcgagccagtgccgttgttcatctcgccaagattgagcaacaaggcgaacttggagcacgccgtcgaagccgcggcggacttcctgaacaaggcggtgaagccggtgatggtcggggggccaaagatccgggtggccaaggcgaagaaggcgttcgccggcatcgcggagtcgagcgggtacccgttcgcggtgatgccgtccgccaagggcctcgtgccggagcaccacccgcggttcatcggcacgtactggggcgccgtgagcaccaccttctgcgccgag

SEQ ID NO: 43694 - DNA, 474 bp, Oryza sativa
  Clone ID: uC-osroM202041h02b1
cttcttttaagagagaagggagtctctcctcttctcttctcttctcgcgccgccgccgtgtccagtgcccaagatgtggggcagcgccgacggcggcacgccggaggtcaccctggagacatccatgggcgccttcaccatcgagatgtactacaagcacgcgcccaagacctgcaggaacttcctcgagctctcgcgccgcggctactacgacaacgtcatcttccatcgcatcatcaaggatttcatcgtgcaaggtggggatcctactggcaccggaagaggcggcgaatccatctacggagcaaagttcgaggatgagattaggccagaactgaagcacaccggcgctggaattctgtcgatggccaacgctggtccaaatacaaatggaagccagatctttattactcttgcgccttgtcagtcacttgatggaaagcatacaatttttgggagagtatcaaaaggaat

SEQ ID NO: 43695 - DNA, 483 bp, Oryza sativa
  unsure (1)..(483): unsure at all n locations
  Clone ID: uC-osroM202041h04b1
gtttttgagttcctcgtttgctccgcctctctttcactcatgggcaagattaagatcggaatcaatgggttcggccgcatcggcaggctggtggccagggtggcgctgcagagcgaggatgtcgagctcgttgccgtcaacgatcccttcatcaccaccgagtacatgacatacatgttcaagtatgacaccgtccacggccagtggaagcatcatgaggtcaaggtcaaggactccaagaccctcatctttggcacgaaagaggttgcggtgttcggctgcaggaaccctgaggagatcccatgggctgcggctggtgctgaatacgttgttgagtctactggtgttttcaccgacaaggacaaggcagcagctcacttgaagggtggtgccaagaaggtcgtcatttctgctcccagcanagacgcccccatgttcgttgttggtgtcaacgagaaggagtacangtctgacgttaacatt

SEQ ID NO: 43696 - DNA, 478 bp, Oryza sativa
  unsure (1)..(478): unsure at all n locations
  Clone ID: uC-osroM202041h05b1
ccactcccccactctctctccggttcatgtcctgctgctccccatgtcgcccccactcgagctcgactacataggcctctcgccgccggtgcccgccgccgccgatgccgccgccgacaacgacctgaagggcaccgagctccgcctcggcctgcccggctcccactcgccggaccgctccccgcccgccgccacgctcgaccttctccccgctgccaagggcgccaagcgcgggttctccgacgaggcgcgtccgctgccggcgtccgccgccgccgccgccgccgccgggaagggcaagaaggcggcggccggcgaggaggatgaggatgcggaggaggaggacacgaaggtcgccgccgcgccgcaggcgcctgctgccaaggctcaggtggttggatggccaccaattcgcagctaccgcaggaacacgatggctactaaccagctgaagagcagcanggaggatgctgaagcg

SEQ ID NO: 43697 - DNA, 382 bp, Oryza sativa
  unsure (1)..(382): unsure at all n locations
  Clone ID: uC-osroM202041h07b1
ttgctcacaaacacagagagcagcccaaaccgaccaaaatcactgcagagttcaggcacttcttcagatagttctccccctctgtttctttctctctttatttctttctcgagttcagtttgagagatggatttggcgtggtggttcgcggcggccgcggtggcgtgcggccttgtggggggcggcagctccgggctgctggagaccaacccgggtttggcgtacaacttctaccagaagtcgtgccccaacgtggactccatcgtccgcagcgtcacctgggcgcaggtcgccgccaacccggcgctccccggacgnctccttcgcctacacttacatgactgcttcgtccaggggtgcgacgcgtcgatcttgctggaca

SEQ ID NO: 43698 - DNA, 452 bp, Oryza sativa
  Clone ID: uC-osroM202041h08b1
gattcagtcgagctatttgaaaatgctggaagcaagagcttctctaccaatctctagattcaaagatcattttctacagttactgaaagagaatgatgtgattgttgtttgcggagaaaccggatgtgggaagacaactcaggtgccacagtttattttggatgatatgattgaatctgagcttggtggttactgcagcatagtctgcacacaaccccggaggatagcggccatttcagtggctgaaagagtgtctagtgagaggtgtgaatcttctcctggatctaaggattctttggtcggatatcaagttcgtcttgacagtgctcggaatgaaaggacaaagcttctgttctgtaccaccggtatccttcttagaaaattatctgggaacaatgatttaagtgatgttactcatgtagtagtagacgaagtacatgaacgtactattt

SEQ ID NO: 43699 - DNA, 483 bp, Oryza sativa
  Clone ID: uC-osroM202041h10b1
ttctctttcaagcgtagagacctctccacacttatcagagtaataaggaaaaaaatatagattaaaaatggtgaagctcgcattcggaagcttgggtgactccttcagcgccacgtccgtgaaggcctacgtggcggagttcatcgccaccctcctcttcgtcttcgctggcgtcggatccgccattgcctatgggcaattgaccaatggtggcgccctcgacccggccggccttgtggcgatcgcgatcgcccatgcactcgccctgttcgtgggcgtttccgtcgccgccaacatctccggcggccaccttaacccggccgtgacgttcggcctcgccgtcggcggccacatcaccatcctcaccggactcttctactggatcgcccagctgctaggcgcctccatcgcctgcctcctcctcaagtttgtcacccaacggcaggccatcccgacgcacggcgtcgctcgcatcagcgagct

SEQ ID NO: 43700 - DNA, 69 bp, Oryza sativa
  Clone ID: uC-osroM202041h11b1
atcatgctcttgaggtgggccataggcggaccaccggcttcatgaggaggcactccgtcgaccgccagg

SEQ ID NO: 43701 - DNA, 471 bp, Oryza sativa
  Clone ID: uC-osroM202041h12b1
gtcacggcggcgcagggctccgacgacaaggactacaaggagccgccgccggcgccgctgttcgagccaggggagctcaagtcgtggtccttctaccgcgcagggatcgccgagttcatggccaccttcctcttcctttacatcaccgtcctcaccgtcatgggggtcaacaactccacctccaagtgcgccaccgtcggcatccagggcatcgcctggtccttcggcggcatgatcttcgccctcgtctactgcaccgccggcatctccggcggccacatcaacccggccgtcaccttcggcctcttcctcgccaggaagctgtccctcaccagggccctcttctacatggtgatgcagtgcctcggcgccatctgtggcgccggcgtcgtcaagggcttccagaagggcctgtacgagaccactcgcggcggcgccaacgtcgtcgcgcccggctacaccaagggcgac
